(19) United States
(12) Patent Application Publication
(10) Pub. No.: US 2023/0333112 A1
(43) Pub. Date: Oct. 19, 2023

(54) METHODS OF DETECTING TRBC1 OR TRBC2

(71) Applicant: Marengo Therapeutics, Inc., Cambridge, MA (US)

(72) Inventors: Andreas Loew, Boston, MA (US); Madan Katragadda, Acton, MA (US); Gurkan Guntas, Newton, MA (US); Peter Marek, Hudson, MA (US); Sangeetha Palakurthi, East Walpole, MA (US)

(21) Appl. No.: 18/174,246

(22) Filed: Feb. 24, 2023

Related U.S. Application Data
(63) Continuation of application No. PCT/US2021/047773, filed on Aug. 26, 2021.
(60) Provisional application No. 63/070,793, filed on Aug. 26, 2020.

(51) Int. Cl. G01N 33/574; C07K 16/28; A61P 35/00

(52) U.S. Cl. CPC G01N 33/57484; C07K 16/2809; A61P 35/00; A61K 2039/505

(57) ABSTRACT

Antibody molecules that bind to TRBC1 or TRBC2 are disclosed. Additionally disclosed are methods of detecting TRBC1 or TRBC2, methods of evaluating a subject or a disorder, and kits using the aforesaid antibody molecules.

### RELATED APPLICATIONS

[0001] This application is a continuation of International Patent Application No. PCT/US2021/047773 filed Aug. 26, 2021, which claims the benefit of U.S. Provisional Patent Application No. 63/070,793 filed on Aug. 26, 2020, the entire contents of which are hereby incorporated by reference.

### SEQUENCE LISTING

[0002] The instant application contains a Sequence Listing which has been submitted electronically in XML format and is hereby incorporated by reference in its entirety. Said XML copy, created on Feb. 23, 2023, is named 53676-742_301_SL.xml and is 2,070,650 bytes in size.

### BACKGROUND

[0003] Lymphomas are cancers that arise from lymphocytes. T cell lymphoma (TCL) is a lymphoma that arises from T cells; these account for approximately 7% of all non-Hodgkin's lymphomas in the United States. Common subtypes of TCL include: Peripheral T Cell Lymphoma, Not Otherwise Specified (PTCLNOS), Anaplastic Large Cell Lymphoma (ALCL), Angioimmunoblastic T Cell Lymphoma (AITL), and Cutaneous T Cell Lymphoma (CTCL). Each type of TCL has its own pathology and symptoms. Given the ongoing need for improved treatment of lymphomas such as TCLs, new compositions and treatments targeting lymphomas, e.g., TCLs, are highly desirable.

### SUMMARY OF THE INVENTION

[0004] Provided herein, inter alia, in an aspect, is a method of identifying a subject in need of treatment for cancer, e.g., a lymphoma or leukemia, e.g., a T cell lymphoma or leukemia, using a composition comprising a polypeptide molecule comprising: (i) a first antigen binding domain that binds to T cell receptor beta chain constant domain 1 (TRBC1) or T cell receptor beta chain constant domain 2 (TRBC2), and (ii) a second antigen binding domain that binds to NKp30, comprising determining (e.g., directly determining or indirectly determining, e.g., obtaining information regarding) whether a subject has cancer cells that express a T cell receptor comprising TRBC2, wherein: responsive to a determination that the subject has cancer cells that express a T cell receptor comprising TRBC2, identifying the subject as a candidate for treatment using a multifunctional molecule comprising an antigen binding domain that binds to TRBC2, and optionally not as a candidate for treatment using a multifunctional molecule comprising an antigen binding domain that binds to TRBC1.

[0005] In some embodiments, the polypeptide molecule is a multifunctional polypeptide molecule.

[0006] In some embodiments, the polypeptide molecule is a multispecific polypeptide molecule.

[0007] In some embodiments, the first antigen binding domain binds to T cell receptor beta chain constant domain 2 (TRBC2), and the first antigen binding domain comprises one or more CDRs, framework regions, variable regions, or antigen binding domains disclosed in any of Tables 21-25, or a sequence having at least 85%, 90%, 95%, or 99% identity thereto.

[0008] In some embodiments, the first antigen binding domain binds to T cell receptor beta chain constant domain 2 (TRBC2), and the first antigen binding domain comprises a VH comprising a heavy chain complementarity determining region 1 (VHCDR1), a VHCDR2, and a VHCDR3, and a VL comprising a light chain complementarity determining region 1 (VLCDR1), a VLCDR2, and a VLCDR3, wherein: the VHCDR1, VHCDR2, and VHCDR3 comprise the amino acid sequences of GXlX2MH, wherein X1 is Y or F, and X2 is P, H, V, Y, K, or A, and SEQ ID NOs: 201, and 7442, respectively; or the VLCDR1, VLCDR2, and VLCDR3 comprise the amino acid sequences of SEQ ID NOs: 7443, 224, and 225, respectively.

[0009] In some embodiments, the VHCDR1, VHCDR2, and VHCDR3 comprise the amino acid sequences of: SEQ ID NOs: 7422, 201, and 7403, respectively; SEQ ID NOs: 7401, 201, and 7403, respectively; SEQ ID NOs: 7394, 201, and 7396, respectively; SEQ ID NOs: 7346, 201, and 7398, respectively; SEQ ID NOs: 7346, 201, and 7400, respectively; SEQ ID NOs: 7405, 201, and 7403, respectively; SEQ ID NOs: 7407, 201, and 7403, respectively; SEQ ID NOs: 7427, 201, and 7403, respectively; or SEQ ID NOs: 7430, 201, and 7403, respectively.

[0010] In some embodiments, the VLCDR1, VLCDR2, and VLCDR3 comprise the amino acid sequences of: SEQ ID NOs: 7410, 224, and 225, respectively; or SEQ ID NOs: 7409, 224, and 225, respectively.

[0011] In some embodiments, the VHCDR1, VHCDR2, VHCDR3, VLCDR1, VLCDR2, and VLCDR3 comprise the amino acid sequences of: SEQ ID NOs: 7422, 201, 7403, 7410, 224, and 225, respectively; SEQ ID NOs: 7401, 201, 7403, 7410, 224, and 225, respectively; SEQ ID NOs: 7394, 201, 7396, 7410, 224, and 225, respectively; SEQ ID NOs: 7346, 201, 7398, 7410, 224, and 225, respectively; SEQ ID NOs: 7346, 201, 7400, 7410, 224, and 225, respectively; SEQ ID NOs: 7405, 201, 7403, 7410, 224, and 225, respectively; SEQ ID NOs: 7407, 201, 7403, 7410, 224, and 225, respectively; SEQ ID NOs: 7427, 201, 7403, 7410, 224, and 225, respectively; SEQ ID NOs: 7430, 201, 7403, 7410, 224, and 225, respectively; SEQ ID NOs: 7422, 201, 7403, 7409, 224, and 225, respectively; SEQ ID NOs: 7401, 201, 7403, 7409, 224, and 225, respectively; SEQ ID NOs: 7394, 201, 7396, 7409, 224, and 225, respectively; SEQ ID NOs: 7346, 201, 7398, 7409, 224, and 225, respectively; SEQ ID NOs: 7346, 201, 7400, 7409, 224, and 225, respectively; SEQ ID NOs: 7405, 201, 7403, 7409, 224, and 225, respectively; SEQ ID NOs: 7407, 201, 7403, 7409, 224, and 225, respectively; SEQ ID NOs: 7427, 201, 7403, 7409, 224, and 225, respectively; or SEQ ID NOs: 7430, 201, 7403, 7409, 224, and 225, respectively.

[0012] In some embodiments, the VH comprises an amino acid sequence selected from the group consisting of SEQ ID NOs: 7420, 7423, 7411, 7412, 7413, 7414, 7415, 7416, 7417, 7425, 7428, and 7431 (or a sequence having at least 85%, 90%, 95%, or 99% identity thereto) and/or the VL comprises an amino acid sequence selected from the group consisting of SEQ ID NOs: 7419 and 7418 (or a sequence having at least 85%, 90%, 95%, or 99% identity thereto).

[0013] In some embodiments, the VH and VL comprise the amino acid sequences of: SEQ ID NOs: 7420 and 7419, respectively (or a sequence having at least 85%, 90%, 95%, or 99% identity thereto); SEQ ID NOs: 7423 and 7419, respectively (or a sequence having at least 85%, 90%, 95%, or 99% identity thereto); SEQ ID NOs: 7411 and 7419, respectively (or a sequence having at least 85%, 90%, 95%, or 99% identity thereto); SEQ ID NOs: 7412 and 7419, respectively (or a sequence having at least 85%, 90%, 95%, or 99% identity thereto); SEQ ID NOs: 7413 and 7419, respectively (or a sequence having at least 85%, 90%, 95%, or 99% identity thereto); SEQ ID NOs: 7414 and 7419, respectively (or a sequence having at least 85%, 90%, 95%, or 99% identity thereto); SEQ ID NOs: 7415 and 7419, respectively (or a sequence having at least 85%, 90%, 95%, or 99% identity thereto); SEQ ID NOs: 7416 and 7419, respectively (or a sequence having at least 85%, 90%, 95%, or 99% identity thereto); SEQ ID NOs: 7417 and 7419, respectively (or a sequence having at least 85%, 90%, 95%, or 99% identity thereto); SEQ ID NOs: 7425 and 7419, respectively (or a sequence having at least 85%, 90%, 95%, or 99% identity thereto); SEQ ID NOs: 7428 and 7419, respectively (or a sequence having at least 85%, 90%, 95%, or 99% identity thereto); SEQ ID NOs: 7431 and 7419, respectively (or a sequence having at least 85%, 90%, 95%, or 99% identity thereto); SEQ ID NOs: 7420 and 7418, respectively (or a sequence having at least 85%, 90%, 95%, or 99% identity thereto); SEQ ID NOs: 7423 and 7418, respectively (or a sequence having at least 85%, 90%, 95%, or 99% identity thereto); SEQ ID NOs: 7411 and 7418, respectively (or a sequence having at least 85%, 90%, 95%, or 99% identity thereto); SEQ ID NOs: 7412 and 7418, respectively (or a sequence having at least 85%, 90%, 95%, or 99% identity thereto); SEQ ID NOs: 7413 and 7418, respectively (or a sequence having at least 85%, 90%, 95%, or 99% identity thereto); SEQ ID NOs: 7414 and 7418, respectively (or a sequence having at least 85%, 90%, 95%, or 99% identity thereto); SEQ ID NOs: 7415 and 7418, respectively (or a sequence having at least 85%, 90%, 95%, or 99% identity thereto); SEQ ID NOs: 7416 and 7418, respectively (or a sequence having at least 85%, 90%, 95%, or 99% identity thereto); SEQ ID NOs: 7417 and 7418, respectively (or a sequence having at least 85%, 90%, 95%, or 99% identity thereto); SEQ ID NOs: 7425 and 7418, respectively (or a sequence having at least 85%, 90%, 95%, or 99% identity thereto); SEQ ID NOs: 7428 and 7418, respectively (or a sequence having at least 85%, 90%, 95%, or 99% identity thereto); or SEQ ID NOs: 7431 and 7418, respectively (or a sequence having at least 85%, 90%, 95%, or 99% identity thereto).

[0014] In some embodiments, the first antigen binding domain binds to T cell receptor beta chain constant domain 2 (TRBC2), and wherein: (i) the first antigen binding domain has a higher affinity for a T cell receptor comprising TRBC2 than for a T cell receptor not comprising TRBC2, optionally wherein the KD for the binding between the first antigen binding domain and TRBC2 is no more than 40%, 30%, 20%, 10%, 1%, 0.1%, or 0.01% of the KD for the binding between the first antigen binding domain and a T cell receptor not comprising TRBC2; (ii) the first antigen binding domain has a higher affinity for a T cell receptor comprising TRBC2 than for a T cell receptor comprising TRBC1, optionally wherein the KD for the binding between the first antigen binding domain and TRBC2 is no more than 40%, 30%, 20%, 10%, 1%, 0.1%, or 0.01% of the KD for the binding between the first antigen binding domain and a T cell receptor comprising TRBC1; or (iii) binding of the first antigen binding domain to TRBC2 on a lymphoma cell or lymphocyte, e.g., T cell, does not appreciably activate the lymphoma cell or lymphocyte, e.g., T cell, e.g., as measured by T cell proliferation, expression of a T cell activation marker (e.g., CD69 or CD25), and/or expression of a cytokine (e.g., TNFα and IFNγ).

[0015] In some embodiments, the first antigen binding domain binds to T cell receptor beta chain constant domain 2 (TRBC2), and the polypeptide molecule binds to TRBC2 monovalently.

[0016] In some embodiments, the polypeptide molecule comprises a configuration shown in any of FIGS. 30A-30D, optionally wherein: (i) the polypeptide molecule comprises an anti-TRBC2 Fab and an anti-NKp30 scFv, e.g., comprises a configuration shown in FIG. 30A; (ii) the polypeptide molecule comprises an anti-TRBC2 Fab and an anti-NKp30 Fab, e.g., comprises a configuration shown in FIG. 30B; (iii) the polypeptide molecule comprises an anti-NKp30 Fab and an anti-TRBC2 scFv, e.g., comprises a configuration shown in FIG. 30C; or (iv) the polypeptide molecule comprises an anti-TRBC2 scFv and an anti-NKp30 scFv, e.g., comprises a configuration shown in FIG. 30D.

[0017] In some embodiments, the polypeptide molecule further comprises a dimerization module comprising one or more immunoglobulin chain constant regions (e.g., Fc regions) comprising one or more of: a paired cavity-protuberance (“knob-in-a hole”), an electrostatic interaction, or a strand-exchange.

[0018] In some embodiments, the polypeptide molecule comprises an anti-TRBC2 amino acid sequence disclosed in any of Tables 21-25, or a sequence having at least 85%, 90%, 95%, or 99% identity thereto, and/or an anti-NKp30 amino acid sequence disclosed in any one of Tables 7, 8, 8A, 8B, 9, 10, 18, and 25, or a sequence having at least 85%, 90%, 95%, or 99% identity thereto.

[0019] In some embodiments, the polypeptide molecule comprises: (i) an anti-TRBC2 VH of SEQ ID NO: 7420 (or a sequence having at least 85%, 90%, 95%, or 99% identity thereto), an anti-TRBC2 VL of SEQ ID NO: 7419 (or a sequence having at least 85%, 90%, 95%, or 99% identity thereto), an anti-NKp30 VH of SEQ ID NO: 7302 (or a sequence having at least 85%, 90%, 95%, or 99% identity thereto), and an anti-NKp30 VL of SEQ ID NO: 7309 (or a sequence having at least 85%, 90%, 95%, or 99% identity thereto); (ii) an anti-TRBC2 VH of SEQ ID NO: 7420 (or a sequence having at least 85%, 90%, 95%, or 99% identity thereto), an anti-TRBC2 VL of SEQ ID NO: 7419 (or a sequence having at least 85%, 90%, 95%, or 99% identity thereto), and an anti-NKp30 scFv of SEQ ID NO: 7311 (or a sequence having at least 85%, 90%, 95%, or 99% identity thereto); or (iii) SEQ ID NOs: 7438, 7439, and 7383 (or a sequence having at least 85%, 90%, 95%, or 99% identity thereto).

[0020] In some embodiments, the polypeptide molecule comprises: (i) an anti-TRBC2 VH of SEQ ID NO: 7423 (or a sequence having at least 85%, 90%, 95%, or 99% identity thereto), an anti-TRBC2 VL of SEQ ID NO: 7419 (or a sequence having at least 85%, 90%, 95%, or 99% identity thereto), an anti-NKp30 VH of SEQ ID NO: 7302 (or a sequence having at least 85%, 90%, 95%, or 99% identity thereto), and an anti-NKp30 VL of SEQ ID NO: 7309 (or a sequence having at least 85%, 90%, 95%, or 99% identity thereto); (ii) an anti-TRBC2 VH of SEQ ID NO: 7423 (or a sequence having at least 85%, 90%, 95%, or 99% identity thereto), an anti-TRBC2 VL of SEQ ID NO: 7419 (or a sequence having at least 85%, 90%, 95%, or 99% identity thereto), and an anti-NKp30 scFv of SEQ ID NO: 7311 (or a sequence having at least 85%, 90%, 95%, or 99% identity thereto); or (iii) SEQ ID NOs: 7440, 7439, and 7383 (or a sequence having at least 85%, 90%, 95%, or 99% identity thereto).

[0021] In some embodiments, the first antigen binding domain binds to T cell receptor beta chain constant domain 1 (TRBC1), and wherein the first antigen binding domain comprises one or more CDRs, framework regions, variable regions, or antigen binding domains disclosed in any of Tables 3A-3B or 4 (e.g., any of SEQ ID NOs: 261-356), or a sequence having at least 85%, 90%, 95%, or 99% identity thereto.

[0022] In some embodiments, the first antigen binding domain binds to T cell receptor beta chain constant domain 1 (TRBC1), and wherein the second antigen binding domain comprises one or more CDRs, framework regions, variable regions, or antigen binding domains disclosed in any one of Tables 8A-8B, 9, and 10 (e.g., any of SEQ ID NOs 357-484): , or a sequence having at least 85%, 90%, 95%, or 99% identity thereto.

[0023] In some embodiments, the second antigen binding domain comprises one or more CDRs, framework regions, variable regions, or antigen binding domains disclosed in any one of Tables 7, 8, 8A, 8B, 9, 10, 18, and 25, or a sequence having at least 85%, 90%, 95%, or 99% identity thereto.

[0024] In some embodiments, the second antigen binding domain comprises a VH comprising a heavy chain complementarity determining region 1 (VHCDR1), a VHCDR2, and a VHCDR3, and a VL comprising a light chain complementarity determining region 1 (VLCDR1), a VLCDR2, and a VLCDR3, wherein the VHCDR1, VHCDR2, and VHCDR3 of the second antigen binding domain comprise the amino acid sequences of: SEQ ID NOs: 7313, 6001, and 7315, respectively; SEQ ID NOs: 7313, 6001, and 6002, respectively; SEQ ID NOs: 7313, 6008, and 6009, respectively; SEQ ID NOs: 7313, 7385, and 7315, respectively; SEQ ID NOs: 7313, 7318, and 6009, respectively; SEQ ID NOs: 375, 377, and 379, respectively; SEQ ID NOs: 389, 391, and 393, respectively; SEQ ID NOs: 403, 405, and 407, respectively; SEQ ID NOs: 417, 419, and 421, respectively; SEQ ID NOs: 431, 433, and 435, respectively; SEQ ID NOs: 445, 447, and 449, respectively; SEQ ID NOs: 459, 461, and 463, respectively; or SEQ ID NOs: 472, 474, and 476, respectively.

[0025] In some embodiments, the VLCDR1, VLCDR2, and VLCDR3 of the second antigen binding domain comprise the amino acid sequences of: SEQ ID NOs: 7326, 7327, and 7329, respectively; SEQ ID NOs: 6063, 6064, and 7293, respectively; SEQ ID NOs: 6070, 6071, and 6072, respectively; SEQ ID NOs: 6070, 6064, and 7321, respectively; SEQ ID NOs: 382, 384, and 386, respectively; SEQ ID NOs: 396, 398, and 400, respectively; SEQ ID NOs: 410, 412, and 414, respectively; SEQ ID NOs: 424, 426, and 428, respectively; SEQ ID NOs: 438, 440, and 442, respectively; SEQ ID NOs: 452, 454, and 456, respectively; SEQ ID NOs: 466, 468, and 469, respectively; or SEQ ID NOs: 479, 481, and 483, respectively.

[0026] In some embodiments, the VHCDR1, VHCDR2, VHCDR3, VLCDR1, VLCDR2, and VLCDR3 of the second antigen binding domain comprise the amino acid sequences of: SEQ ID NOs: 7313, 6001, 7315, 7326, 7327, and 7329, respectively; SEQ ID NOs: 7313, 6001, 6002, 6063, 6064, and 7293, respectively; SEQ ID NOs: 7313, 6008, 6009, 6070, 6071, and 6072, respectively; SEQ ID NOs: 7313, 7385, 7315, 6070, 6064, and 7321, respectively; SEQ ID NOs: 7313, 7318, 6009, 6070, 6064, and 7321, respectively; SEQ ID NOs: 375, 377, 379, 382, 384, and 386, respectively; SEQ ID NOs: 389, 391, 393, 396, 398, and 400, respectively; SEQ ID NOs: 403, 405, 407, 410, 412, and 414, respectively; SEQ ID NOs: 417, 419, 421, 424, 426, and 428, respectively; SEQ ID NOs: 431, 433, 435, 438, 440, and 442, respectively; SEQ ID NOs: 445, 447, 449, 452, 454, and 456, respectively; SEQ ID NOs: 459, 461, 463, 466, 468, and 469, respectively; or SEQ ID NOs: 472, 474, 476, 479, 481, and 483, respectively.

[0027] In some embodiments, (i) the VH of the second antigen binding domain comprises an amino acid sequence selected from the group consisting of SEQ ID NOs: 7302, 7298, 7300, 7301, 7303, and 7304 (or a sequence having at least 85%, 90%, 95%, or 99% identity thereto) and/or the VL of the second antigen binding domain comprises an amino acid sequence selected from the group consisting of SEQ ID NOs: 7309, 7305, 7299, and 7306-7308 (or a sequence having at least 85%, 90%, 95%, or 99% identity thereto); (ii) the VH of the second antigen binding domain comprises an amino acid sequence selected from the group consisting of SEQ ID NOs: 6121 and 6123-6128 (or a sequence having at least 85%, 90%, 95%, or 99% identity thereto) and/or the VL of the second antigen binding domain comprises an amino acid sequence selected from the group consisting of SEQ ID NOs: 7294 or 6137-6141 (or a sequence having at least 85%, 90%, 95%, or 99% identity thereto); or (iii) the VH of the second antigen binding domain comprises an amino acid sequence selected from the group consisting of SEQ ID NOs: 6122 and 6129-6134 (or a sequence having at least 85%, 90%, 95%, or 99% identity thereto) and/or the VL of the second antigen binding domain comprises an amino acid sequence selected from the group consisting of SEQ ID NOs: 6136 or 6142-6147 (or a sequence having at least 85%, 90%, 95%, or 99% identity thereto); or (iv) the VH of the second antigen binding domain comprises an amino acid sequence selected from the group consisting of SEQ ID NOs: 357-364 (or a sequence having at least 85%, 90%, 95%, or 99% identity thereto) and/or the VL of the second antigen binding domain comprises an amino acid sequence selected from the group consisting of SEQ ID NOs: 365-372 (or a sequence having at least 85%, 90%, 95%, or 99% identity thereto).

[0028] In some embodiments, the VH and VL of the second antigen binding domain comprise the amino acid sequences of: SEQ ID NOs: 7302 and 7309, respectively (or a sequence having at least 85%, 90%, 95%, or 99% identity thereto); or SEQ ID NOs: 7302 and 7305, respectively (or a sequence having at least 85%, 90%, 95%, or 99% identity thereto).

[0029] In some embodiments, the second antigen binding domain comprise the amino acid sequences of: SEQ ID NO: 7311 or 7310 (or a sequence having at least 85%, 90%, 95%, or 99% identity thereto); SEQ ID NO: 6187 or 6188 (or a sequence having at least 85%, 90%, 95%, or 99% identity thereto); SEQ ID NO: 6189 or 6190 (or a sequence having at least 85%, 90%, 95%, or 99% identity thereto); or any of SEQ ID NOs: 373 and 485-491.

[0030] In some embodiments, the method as described herein further comprises: responsive to identifying the subject as a candidate for treatment using a multifunctional molecule comprising an antigen binding domain that binds to TRBC2, treating the subject with (e.g., administering to the subject) a multifunctional molecule as described herein.

[0031] In some embodiments, the cancer is leukemia or lymphoma.

[0032] In some embodiments, the cancer is selected from Acquired immune deficiency syndrome (AIDS)-associated lymphoma, Angioimmunoblastic T-cell lymphoma, Adult T-cell leukemia/lymphoma, Burkitt lymphoma, Central nervous system (CNS) lymphoma, Diffuse large B-cell lymphoma (DLBCL), Lymphoblastic lymphoma, Mantle cell lymphoma (MCL), Peripheral T-cell lymphoma (PTCL) (e.g., Hepatosplenic T-cell lymphoma (HSGDTCL), Subcutaneous paniculitis-like T-cell lymphoma, or Enteropathy-associated T-cell lymphoma), Transformed follicular and transformed mucosa-associated lymphoid tissue (MALT) lymphomas, Cutaneous T-cell lymphoma (mycosis fungoides and Sézary syndrome), Follicular lymphoma, Lymphoplasmacytic lymphoma/Waldenström macroglobulinemia, Marginal zone B-cell lymphoma, Gastric mucosa-associated lymphoid tissue (MALT) lymphoma, Chronic lymphocytic leukemia/small-cell lymphocytic lymphoma (CLL/SLL), Extranodal T-/NK-cell lymphoma (nasal type), and Anaplastic large-cell lymphoma (e.g., primary cutaneous anaplastic large-cell lymphoma or systemic anaplastic large-cell lymphoma).

[0033] In some embodiments, the cancer is Peripheral T-cell lymphoma (PTCL).

[0034] In another aspect, provides herein is a method of detecting TRBC1 or TRBC2 in a sample or subject, comprising: contacting the sample or subject with an anti-TRBC1 antibody molecule described herein or an anti-TRBC2 antibody molecule described herein; and detecting formation of a complex between the antibody molecule and the sample or subject, thereby detecting TRBC1 or TRBC2.

[0035] In some embodiments, TRBC1 or TRBC2 is detected in vitro or in vivo.

[0036] In some embodiments, the method as described herein further comprises contacting a reference sample or subject with the antibody molecule; and detecting formation of a complex between the antibody molecule and the reference sample or subject, wherein a change, e.g., a statistically significant change, in the formation of the complex in the sample or subject, relative to the reference sample or subject is indicative of the presence of TRBC1 or TRBC2 in the sample or subject.

[0037] In some embodiments, the method as described herein further comprises obtaining a sample from a subject.

[0038] In some embodiments, the sample comprises one or more of plasma, tissue (e.g., cancerous tissue), biopsy, blood (e.g., whole blood), PBMCs, bone marrow, and/or lymphatic tissue, e.g., lymph node. comprises one or more of plasma, tissue (e.g., cancerous tissue), biopsy, blood (e.g., whole blood), PBMCs, bone marrow, and/or lymphatic the sample has not been frozen and/or fixed. comprises one or more of plasma, tissue (e.g., cancerous tissue), biopsy, blood (e.g., whole blood), PBMCs, bone marrow, and/or lymphatic the sample has been frozen (e.g., snap frozen) and/or fixed (e.g., formalin-fixed paraffin-embedded (FFPE)). comprises one or more of plasma, tissue (e.g., cancerous tissue), biopsy, blood (e.g., whole blood), PBMCs, bone marrow, and/or lymphatic the subject has, or is at risk of having, a disease or disorder described herein (e.g., cancer, e.g., a lymphoma, e.g., a T cell lymphoma).

[0039] In some embodiments, the method as described herein further comprises performing a flow analysis, e.g., using a multi-panel method.

[0040] In some embodiments, the method as described herein further comprises assessing T-cell clonality, e.g., to determine the presence and/or level of T cell malignancy.

[0041] In some embodiments, the method as described herein further comprises measuring the level of TRBC1+ or TRBC2+ cells from the biological sample (e.g., determining if TRBC1+ or TRBC2+ cells are depleted, e.g., relative to a reference sample or subject).

[0042] In some embodiments, the method as described herein further comprises measuring the intracellular level of TRBC1 or TRBC2.

[0043] In some embodiments, the method as described herein further comprises measuring the membrane level of TRBC1 or TRBC2.

[0044] In some embodiments, the method as described herein further comprises evaluating the subject for a change in prognosis, severity, or presence or absence of a disease or disorder (e.g., cancer), e.g., after treatment (e.g., with an antibody molecule described herein).

[0045] In some embodiments, the antibody molecule is detectably labeled.

[0046] In another aspect, provides herein is a method of evaluating a subject, comprising: contacting a sample (e.g., a sample described herein) from the subject with an anti-TRBC1 antibody molecule described herein or an anti-TRBC2 antibody molecule described herein; and detecting formation of a complex between the antibody molecule and the sample, thereby evaluating the subject.

[0047] In some embodiments, the subject has, or is at risk of having, a disease or disorder described herein (e.g., cancer, e.g., a lymphoma, e.g., a T cell lymphoma).

[0048] In some embodiments, the subject has not been treated with an antibody molecule described herein.

[0049] In some embodiments, the subject has been treated with an antibody molecule described herein.

[0050] In another aspect, provides herein is a kit comprising an anti-TRBC1 antibody molecule described herein or an anti-TRBC2 antibody.

[0051] In another aspect, provides herein is a method of identifying a subject in need of treatment for cancer comprising determining that a peripheral blood mononuclear cell (PBMC)-derived T cell population obtained from the subject has a monotypia and specificity for TRBC1 or TRBC2, wherein the monotypia and specificity for TRBC1 or TRBC2 in the PBMC-derived T cell population indicates that the subject has a T cell malignancy, thereby identifying the subject as a candidate for treatment for the cancer.

[0052] Unless otherwise defined, all technical and scientific terms used herein have the same meaning as commonly understood by one of ordinary skill in the art to which this invention belongs. Although methods and materials similar or equivalent to those described herein can be used in the practice or testing of the present invention, suitable methods and materials are described below. All publications, patent applications, patents, and other references mentioned herein are incorporated by reference in their entirety. In the case of conflict, the present specification, including definitions, will control. In addition, the materials, methods, and examples are illustrative only and are not intended to be limiting.

[0053] Other features and advantages of the invention will be apparent from the following detailed description and claims.

### BRIEF DESCRIPTION OF THE DRAWINGS

[0054] FIGS. 1A-1D are schematic representations of exemplary formats and configurations of multispecific antibodies (e.g., bispecific antibodies) that bind to TRBC1 and NKp30. FIG. 1A depicts an anti-TRBC1 antibody fused to an anti-NKp30 scFv. The anti-TRBC1 antibody comprises two heavy chains and two light chains. The anti-NKp30 scFv is fused to the N-terminus of one heavy chain of the anti-TRBC1 antibody. FIG. 1B depicts an antibody molecule comprising an anti-TRBC1 Fab, an anti-NKp30 scFv, and an Fc dimer. The Fc dimer comprises two Fc chains. The C-terminus of the heavy chain of the anti-TRBC1 Fab is fused to the N-terminus of one Fc chain. The anti-NKp30 scFv is fused to the N-terminus of the other Fc chain. FIGS. 1C and 1D depict an anti-TRBC1 antibody fused to two anti-NKp30 scFvs. The anti-TRBC1 antibody comprises two heavy chains and two light chains. In FIG. 1C, the two anti-NKp30 scFvs are fused to the C-terminus of the two light chains of the anti-TRBC1 antibody, respectively. In FIG. 1D, the two anti-NKp30 scFvs are fused to the N-terminus of the two heavy chains of the anti-TRBC1 antibody, respectively.

[0055] FIGS. 2A-2F are schematic representations of exemplary formats and configurations of antibody molecules that comprises a moiety that binds to TRBC1 and a TRAIL molecule (e.g., a trimeric, dimeric, or monomeric TRAIL molecule). FIGS. 2A and 2D depict an antibody molecule comprising an anti-TRBC1 Fab, a trimeric TRAIL molecule, and an Fc dimer. FIGS. 2B and 2E depict an antibody molecule comprising an anti-TRBC1 Fab, a dimeric TRAIL molecule, and an Fc dimer.

[0056] FIGS. 2C and 2F depict an antibody molecule comprising an anti-TRBC1 Fab, a monomeric TRAIL molecule, and an Fc dimer. The Fc dimer comprises two Fc chains. The C-terminus of the heavy chain of the anti-TRBC1 Fab is fused to the N-terminus of one Fc chain. The trimeric, dimeric, or monomeric TRAIL molecule is fused to the N-terminus of the other Fc chain. In some embodiments, the antibody molecule depicted in FIG. 2A comprises the amino acid sequences of SEQ ID NOs: 6169, 6167, and 6159. In some embodiments, the antibody molecule depicted in FIG. 2B comprises the amino acid sequences of SEQ ID NOs: 6169, 6167, and 6158. In some embodiments, the antibody molecule depicted in FIG. 2C comprises the amino acid sequences of SEQ ID NOs: 6169, 6167, and 6157. In some embodiments, then antibody molecule depicted in FIG. 2D comprises the amino acid sequences of SEQ ID NOs: 6169, 6167, and 6162. In some embodiments, then antibody molecule depicted in FIG. 2E comprises the amino acid sequences of SEQ ID NOs: 6169, 6167, and 6161. In some embodiments, then antibody molecule depicted in FIG. 2F comprises the amino acid sequences of SEQ ID NOs: 6169, 6167, and 6160.

[0057] FIGS. 3A and 3B are schematic representations of exemplary formats and configurations of multispecific antibodies (e.g., bispecific antibodies) that bind to TRBC1 and DR5. FIG. 3A depicts a multispecific antibody (e.g., a bispecific antibody) comprising an anti-TRBC1 Fab, an anti-DR5 scFv, and an Fc dimer. The Fc dimer comprises two Fc chains. The C-terminus of the heavy chain of the anti-TRBC1 Fab is fused to the N-terminus of one Fc chain. The anti-DR5 scFv is fused to the N-terminus of the other Fc chain. FIG. 3B depicts an anti-TRBC1 antibody fused to two anti-DR5 scFvs. The anti-TRBC1 antibody comprises two heavy chains and two light chains. The two anti-DR5 scFvs are fused to the C-terminus of the two light chains of the anti-TRBC1 antibody, respectively. In some embodiments, the multispecific antibody depicted in FIG. 3A comprises the amino acid sequences of SEQ ID NOs: 6169, 6167, and 6163. In some embodiments, the multispecific antibody depicted in FIG. 3B comprises the amino acid sequences of SEQ ID NOs: 6170 and 6168.

[0058] FIGS. 4A-4B show the alignment of the H131 source mouse VH and VL framework 1, CDR 1, framework 2, CDR 2, framework 3, CDR3, and framework 4 regions with their respective humanized sequences. Kabat CDRs are shown in bold, Chothia CDRs are shown in italics, and combined CDRs are shown in boxes. The framework positions that were back mutated are double underlined. FIG. 4A shows VH sequences for murine H131 (SEQ ID NO: 1) and humanized H131 (SEQ ID NO: 9). FIG. 4B shows VL sequences for murine H131 (SEQ ID NO: 2) and humanized H131 (SEQ ID NO: 10 and SEQ ID NO: 11).

[0059] FIGS. 5A-5B show the alignment of the 16G8 source mouse VH and VL framework 1, CDR 1, framework 2, CDR 2, framework 3, CDR3, and framework 4 regions with their respective humanized sequences. Kabat CDRs are shown in bold, Chothia CDRs are shown in italics, and combined CDRs are shown in boxes. The framework positions that were back mutated are double underlined. FIG. 5A shows VH sequences for murine 16G8 (SEQ ID NO: 15) and humanized 16G8 (SEQ ID NOs: 23-25). FIG. 5B shows VL sequences for murine 16G8 (SEQ ID NO: 16) and humanized 16G8 (SEQ ID NOs: 26-30).

[0060] FIG. 6 depicts the phylogenetic tree of TCRBV gene family and subfamilies with corresponding antibodies mapped. Subfamily identities are as follows: Subfamily A: TCRβ V6; Subfamily B: TCRβ V10; Subfamily C: TCRβ V12; Subfamily D: TCRβ V5; Subfamily E: TCRβ V7; Subfamily F: TCRβ V11; Subfamily G: TCRβ V14; Subfamily H: TCRβ V16; Subfamily I: TCRβ V18; Subfamily J: TCRβ V9; Subfamily K: TCRβ V13; Subfamily L: TCRβ V4; Subfamily M: TCRβ V3; Subfamily N: TCRβ V2; Subfamily O: TCRβ V15; Subfamily P: TCRβ V30; Subfamily Q: TCRβ V19; Subfamily R: TCRβ V27; Subfamily S: TCRβ V28; Subfamily T: TCRβ V24; Subfamily U: TCRβ V20; Subfamily V: TCRβ V25; and Subfamily W: TCRβ V29 subfamily. Subfamily members are described in detail herein in the Section titled “TCR beta V (TCRβV)”.

[0061] FIG. 7 is a graph showing binding of JOVI.1 and humanized JOVI.1 to human TRBC1.

[0062] FIG. 8 is a set of graphs showing binding of JOVI.1 Fab (left) and humanized JOVI.1 Fab to human TRBC1 (right).

[0063] FIG. 9 is a graph showing binding of NKp30 antibodies to NK92 cells. Data was calculated as the percent-AF747 positive population.

[0064] FIG. 10 is a graph showing activation of NK92 cells by NKp30 antibodies. Data were generated using hamster anti-NKp30 mAbs.

[0065] FIGS. 11A-11E are schematic representations of anti-TRBC1/NKp30 antibodies and control molecules.

[0066] FIGS. 12A-12B are graphs showing binding of antibodies to Fey receptor-expressing THP1 cells.

[0067] FIGS. 13A-13D are graphs showing T cell activation after incubation with the indicated antibodies. FIG. 13A is a graph showing % CD4+ divided. FIG. 13B is a graph showing % CD8+ divided. FIG. 13C is a graph showing % CD69−CD25+ of CD4+. FIG. 13D is a graph showing % CD69−CD25+ of CD8+.

[0068] FIGS. 14A-14D are schematic representations of anti-TRBC1/NKp30 antibodies. In FIGS. 14B and 14D, “460” indicates a Fab based on BIM0460; “578” indicates a Fab based on BJM0578; “407” indicates a scFv (FIG. 18B) or a Fab (FIG. 14D) based on BJM0407; “411” indicates a scFv (FIG. 18B) or a Fab (FIG. 14D) based on BJM0411; and “N297A” indicates that the antibody comprises an N297A mutation in the Fc region.

[0069] FIGS. 15A-15D are graphs showing binding of the indicated antibodies to NK cell line KHYG-1 (FIG. 15A) and TRBC1+ Jurkat cells (FIG. 15B). FIG. 15C is a table providing information on the antibodies tested. FIG. 15D is a table providing EC50 for binding to KHYG-1 cells or TRBC1+ Jurkat cells.

[0070] FIGS. 16A-16C are graphs showing killing of TRBC1+ target cells in the presence of NK-92 effector cells. The target cells are TRBC1+ Jurkat cells (FIG. 16A) or H9 cells (FIG. 16B). TRBC2+ HPB-ALL cells were used as a control (FIG. 16C).

[0071] FIGS. 17A-17C are graphs showing killing of TRBC1+ target cells in the presence of primary NK cells. The target cells are TRBC1+ Jurkat cells (FIG. 17A) or H9 cells (FIG. 17B). TRBC2+ HPB-ALL cells were used as a control (FIG. 17C).

[0072] FIGS. 18A-18C are graphs showing activation of NK cells after co-culture with TRBC1+ Jurkat cells in the presence of anti-TRBC1/NKp30 antibodies. FIG. 18A shows % CD69+CD107a+NK cells. FIG. 18B shows the level of IFNγ. FIG. 18C shows the level of TNFα.

[0073] FIGS. 19A-19B are graphs showing cytokine levels produced by NK cells in the presence or absence of TRBC1+ Jurkat cells. FIG. 19A shows the level of IFNγ. FIG. 19B shows the level of TNFα.

[0074] FIG. 20 is a graph showing % NK cell death induced by the indicated antibodies in the presence of TRBC1+ Jurkat cells.

[0075] FIGS. 21A and 21B are schematic representations of a single arm anti-TRBC1 antibody and a bispecific anti-TRBC1/NKp30 antibody, respectively.

[0076] FIGS. 22A-22D are graphs showing NK cell-mediated killing of TRBC1+ PDX in the presence of the indicated antibodies.

[0077] FIG. 23 is a panel of figures showing killing of TRBC1+ Jurkat cells in the presence of the indicated antibodies. The NK cells tested were isolated from healthy donors (upper panel) or from PTCL patients (lower panel).

[0078] FIG. 24 is a panel of figures showing activation of NK cells during the killing assay shown in FIG. 23. The NK cells tested were isolated from healthy donors (upper panel) or from PTCL patients (lower panel).

[0079] FIGS. 25A and 25B are a panel of figures showing IFNγ (FIG. 25A) or TNFα (FIG. 25B) secretion levels of NK cells when co-cultured with Jurkat cells in the presence of the indicated antibodies. The NK cells tested were isolated from healthy donors (upper panel) or from PTCL patients (lower panel).

[0080] FIGS. 26A-26C are graphs measuring binding to NKp30 in ELISA. FIG. 26A shows binding of B7-H6 to NKp30. FIG. 26B shows binding of BJM1042 to NKp30. FIG. 26C shows binding of B7-H6 to NKp30 in the presence of varying concentrations of the indicated antibodies.

[0081] FIGS. 27A-27C are graphs from an in vivo TRBC1+ tumor study. FIG. 27A shows the study design. FIG. 27B shows tumor volume under the indicated treatments. FIG. 27C is a water plot showing % change in tumor volume on Day 3 post treatment. The following treatment groups are shown in FIG. 27C from left to right: No NK, PBS; No NK, TRBC1×NKp30; NK, PBS; NK, TRBC1; NK, NKp30; and NK+ lmpk BJM1042.

[0082] FIGS. 28A-28B are graphs from an in vivo TRBC2+ tumor study. FIG. 28A shows the study design. FIG. 28B shows tumor volume under the indicated treatments.

[0083] FIGS. 29A-29D are schematic representations of anti-TRBC1/NKp30 antibodies.

[0084] FIGS. 30A-30D are schematic representations of anti-TRBC2/NKp30 antibodies.

[0085] FIGS. 31A-31B are schematic representations of antibody designs. FIG. 31A is a schematic representation of a bispecific antibody comprising anti-TRBC2 Fab and anti-NKp30 ScFv arms. FIG. 31B shows a design similar to that of FIG. 31A, lacking the NK-p30 binding chain.

[0086] FIGS. 32A-32C are representative data showing selective binding of the anti-TRBC2 antibody to cells expressing either human TRBC2, human TRBC1 or human NK-p30. FIG. 32A shows binding to TRBC2+ HPB-ALL cells; FIG. 32B shows binding to NKp30+ KHYG-1 cells; FIG. 32C shows binding to TRBC1+ Jurkat cells.

[0087] FIGS. 33A-33D are representative data showing selective killing of TRBC2 expressing cell lines (TRBC2+) and not TRBC1 (TRBC1+) expressing cell lines. FIG. 33A, data showing TRBC2×NKp30 bispecifics selectively kill TRBC2+ HPB-ALL cells with KHYG-1 NK cells as effectors in vitro. FIG. 33B, data showing TRBC2×NKp30 bispecifics do not kill TRBC1+ Jurkat cells in vitro.

[0088] FIG. 33C, data showing TRBC2×NKp30 bispecifics selectively kill TRBC2+ HPB-ALL cells with primary NK cells as effectors in vitro. FIG. 33D, data showing TRBC2×NKp30 bispecifics do not kill TRBC1+ Jurkat cells with primary NK cells in vitro.

[0089] FIGS. 34A-34B are representative data showing TRBC2×NKp30 bispecifics activate primary NK cells cocultured with TRBC2+ cells in vitro. FIG. 34A, data showing primary NK cell activation in cocultures with TRBC2+ HPB-ALL cells. FIG. 34B, data showing lack of primary NK cell activation in cocultures with TRBC1+ Jurkat cells.

[0090] FIGS. 35A-35D are representative data showing TRBC2×NKp30 bispecific antibodies induce secretion of NK activation state relevant cytokines in cocultures of TRBC1+ cells and primary NK cells. FIG. 35A shows increased IFNγ secretion in cocultures of HPB-ALL cells and primary NK cells in vitro. FIG. 35B shows lack IFNγ secretion in cocultures of Jurkat cells and primary NK cells in vitro. FIG. 35C shows increased TNFα secretion in cocultures of HPB-ALL cells and primary NK cells in vitro. FIG. 35D shows lack TNFα secretion in cocultures of Jurkat cells and primary NK cells in vitro.

[0091] FIGS. 36A-36C are representative data showing targeted killing of patient derived xenograft cells by TRBC2×NKp30 bispecific antibodies. FIG. 36A, data showing TRBC2×NKp30 bispecifics selectively kill TRBC2+ cells derived from a patient with Adult T-cell Leukemia/Lymphoma (ATLL) (PDX2) with KHYG-1 cells as effectors. FIG. 36B, data showing TRBC2×NKp30 bispecifics selectively kill TRBC2+ cells derived from a patient with Hepatosplenic T-cell Lymphoma (HTCL) (PDX5) with KHYG-1 cells as effectors in vitro. FIG. 35C, data showing TRBC2×NKp30 bispecifics does not kill TRBC1+ cells derived from a patient with Adult T-cell Leukemia/Lymphoma (ATLL) (PDX3) with KHYG-1 cells as effectors in vitro.

[0092] FIG. 37 is representative data showing specific deletion of TRBC1+ vs TRBC2+ T cells from human PBMCs using target specific bispecific antibodies as indicated in the figure. Data was collected at 4 days after treatment.

[0093] FIG. 38 is representative data showing specific depletion TRBC1+ vs TRBC2+ T cells from human PBMCs using either TRBC1×NKp30 or TRBC2×NKp30 bispecific antibodies in vivo. Mice were administered human PBMCs at day 0, and treated with either TRBC1×NKp30 or TRBC2×NKp30 antibodies, and whole blood was harvested on day 7.

[0094] FIG. 39 is representative data showing significant antitumor activity in TRBC2+ HPB-ALL derived xenograft mouse model engrafted with human NK cells.

[0095] FIG. 40 is representative flow analysis data confirming consistent profiles of TRBC1 and TRBC2 noted in healthy donor PBMCs (T-lymphocytes: CD4: Light grey. CD8: Grey).

[0096] FIG. 41 is representative flow analysis data confirming monotypia for TRBC1 T cell Lymphoma sample #1.
[0097] T-lymphocytes: CD4: Light grey. CD8: Grey.
[0098] Aberrant CD3 dim CD4+ T lymphocytes. Dark grey, TCRB1+

[0099] FIG. 42 is representative flow analysis data confirming monotypia for TRBC1 T cell Lymphoma sample #2.
[0100] Normal T-lymphocytes: CD4+CD8+: Dark grey
[0101] Aberrant CD4+ T lymphocytes: Grey. TCRB1+
[0102] Other Lymphocytes (NK+B): Light grey

[0103] FIG. 43 is representative flow analysis data confirming monotypia for TRBC2 T cell Lymphoma sample.
[0104] Normal T-lymphocytes: CD4+CD8+: Dark grey
[0105] Aberrant CD8+ T lymphocytes: Grey. TCRB2+
[0106] Other Lymphocytes (NK+B): Light grey

[0107] FIG. 44 is representative flow analysis data confirming monotypia for TRBC2 T cell Lymphoma sample.
[0108] Normal T-lymphocytes: CD4+CD8+: Dark grey
[0109] Aberrant TCD4+ lymphocytes: Grey. TCRB2+
[0110] Other Lymphocytes (NK+B): Light grey

### DETAILED DESCRIPTION OF THE INVENTION

[0111] Disclosed herein are multifunctional molecules (also referred to herein as “multispecific molecules”) that include a plurality of (e.g., two or more) functionalities (or binding specificities), comprising (i) an antigen binding domain that preferentially binds to TRBC1 or a TRBC2, and (ii) one, two, or all of (a) an immune cell engager chosen from a T cell engager, an NK cell engager (e.g., a molecule that binds to NKp30, NKp46, NKG2D, or CD16), a B cell engager, a dendritic cell engager, or a macrophage cell engager; (b) a cytokine molecule; and (c) a stromal modifying moiety. Also disclosed herein are antibody molecules comprising an antigen binding domain that preferentially binds to TRBC1 or TRBC2. In some embodiments, the antigen binding domain that binds to TRBC1 comprises a sequence or part of a sequence found in Tables 2, 3, 3A, 3B, 4, 5, 6. In some embodiments, the antigen binding domain that binds to TRBC2 comprises a sequence or part of a sequence found in Tables 21-24. In some embodiments, the immune cell engager comprises an NK cell engager comprising a sequence or part of a sequence found in Tables 7, 8, 8A, 8B, 9, 10 and 18. In some embodiments, the antigen binding domain comprises a sequence or part of a sequence found in Tables 2, 3, 3A, 3B, 4, 5, 6 and the immune cell engager comprises an NK cell engager comprising a sequence or part of a sequence found in Tables 7, 8, 8A, 8B, 9, 10 and 18. In some embodiments, the antigen binding domain comprises a sequence or part of a sequence found in Tables 21-24 and the immune cell engager comprises an NK cell engager comprising a sequence or part of a sequence found in Tables 7, 8, 8A, 8B, 9, 10 and 18.

[0112] In an embodiment, the multispecific or multifunctional molecule is a bispecific (or bifunctional) molecule, a trispecific (or trifunctional) molecule, or a tetraspecific (or tetrafunctional) molecule.

[0113] In some embodiments, the multifunctional molecule comprises an antigen binding domain that binds a tumor antigen on the surface of a T cell receptor comprising TRBC1 targets immune cells (e.g., via the immune cell engager) to lymphoma cells (e.g., T cells) that exhibit T cell receptors comprising TRBC1. In some embodiments, the multifunctional molecule comprises an antigen binding domain that binds a tumor antigen on the surface of a T cell receptor comprising TRBC2 targets immune cells (e.g., via the immune cell engager) to lymphoma cells (e.g., T cells) that exhibit T cell receptors comprising TRBC2.

[0114] Without being bound by theory, the multispecific or multifunctional molecules disclosed herein are expected to localize (e.g., bridge) and/or activate an immune cell (e.g., an immune effector cell chosen from a T cell, an NK cell, a B cell, a dendritic cell or a macrophage), in the presence of a cell (e.g., a cancer cell, e.g., lymphoma cell, e.g., T cell) expressing a T cell receptor comprising TRBC1 or TRBC2, e.g., on the surface. Increasing the proximity and/or activity of the immune cell, in the presence of the cell (e.g., cancer cell, e.g., lymphoma cell, e.g., T cell) expressing a T cell receptor comprising TRBC1 or TRBC2, using the multispecific or multifunctional molecules described herein is expected to enhance an immune response against the target cell, thereby providing a more effective therapy.

[0115] Without being bound by theory, it is thought that T cells do not typically express T cell receptors comprising TRBC1 and T cell receptors comprising TRBC2. By utilizing, in some embodiments, a multispecific or multifunctional molecule specific for a T cell receptor comprising TRBC1 or a T cell receptor comprising TRBC2, but not with specificity for both types of T cell receptors, it is expected that the deleterious effects of increasing the proximity or activity of immune cells toward T cells generally may be mitigated. In this way, it is thought that use of the multispecific or multifunctional molecules disclosed herein may increase the proximity or activity of immune cells toward cancer cells (e.g., lymphoma cells, e.g., T cells) without necessarily increasing proximity or activity of immune cells toward T cells generally.

[0116] Novel multifunctional, e.g., multispecific, molecules that include (i) a stromal modifying moiety and (ii) an antigen binding domain that preferentially binds to tumor antigen on a lymphoma cell (e.g., T cell), e.g., a T cell receptor comprising TRBC1 or a T cell receptor comprising TRBC2 are disclosed. Without being bound by theory, the multifunctional molecules disclosed herein are believed to inter alia target (e.g., localize to) a cancer site, and alter the tumor stroma, e.g., alter the tumor microenvironment near the cancer site. The multifunctional molecules can further include one or both of: an immune cell engager (e.g., chosen from one, two, three, or all of a T cell engager, NK cell engager, a B cell engager, a dendritic cell engager, or a macrophage cell engager); and/or a cytokine molecule. Accordingly, provided herein are, inter alia, multifunctional, e.g., multispecific molecules, that include the aforesaid moieties, nucleic acids encoding the same, methods of producing the aforesaid molecules, and methods of treating a cancer using the aforesaid molecules.

[0117] Accordingly, provided herein are, inter alia, multispecific or multifunctional molecules (e.g., multispecific or multifunctional antibody molecules) that include the aforesaid moieties, nucleic acids encoding the same, methods of producing the aforesaid molecules, and methods of treating a disease or disorder, e.g., cancer, using the aforesaid molecules.

### Definitions

[0118] In some embodiments, the multifunctional molecule includes an immune cell engager. “An immune cell engager” refers to one or more binding specificities that bind and/or activate an immune cell, e.g., a cell involved in an immune response. In embodiments, the immune cell is chosen from a T cell, an NK cell, a B cell, a dendritic cell, and/or the macrophage cell. The immune cell engager can be an antibody molecule, a receptor molecule (e.g., a full length receptor, receptor fragment, or fusion thereof (e.g., a receptor-Fc fusion)), or a ligand molecule (e.g., a full length ligand, ligand fragment, or fusion thereof (e.g., a ligand-Fc fusion)) that binds to the immune cell antigen (e.g., the T cell, the NK cell antigen, the B cell antigen, the dendritic cell antigen, and/or the macrophage cell antigen). In embodiments, the immune cell engager specifically binds to the target immune cell, e.g., binds preferentially to the target immune cell. For example, when the immune cell engager is an antibody molecule, it binds to an immune cell antigen (e.g., a T cell antigen, an NK cell antigen, a B cell antigen, a dendritic cell antigen, and/or a macrophage cell antigen) with a dissociation constant of less than about 10 nM.

[0119] In some embodiments, the multifunctional molecule includes a cytokine molecule. As used herein, a “cytokine molecule” refers to full length, a fragment or a variant of a cytokine; a cytokine further comprising a receptor domain, e.g., a cytokine receptor dimerizing domain; or an agonist of a cytokine receptor, e.g., an antibody molecule (e.g., an agonistic antibody) to a cytokine receptor, that elicits at least one activity of a naturally-occurring cytokine. In some embodiments the cytokine molecule is chosen from interleukin-2 (IL-2), interleukin-7 (IL-7), interleukin-12 (IL-12), interleukin-15 (IL-15), interleukin-18 (IL-18), interleukin-21 (IL-21), or interferon gamma, or a fragment or variant thereof, or a combination of any of the aforesaid cytokines. The cytokine molecule can be a monomer or a dimer. In embodiments, the cytokine molecule can further include a cytokine receptor dimerizing domain. In other embodiments, the cytokine molecule is an agonist of a cytokine receptor, e.g., an antibody molecule (e.g., an agonistic antibody) to a cytokine receptor chosen from an IL-15Ra or IL-21R.

[0120] As used herein, the term “molecule” as used in, e.g., antibody molecule, cytokine molecule, receptor molecule, includes full-length, naturally-occurring molecules, as well as variants, e.g., functional variants (e.g., truncations, fragments, mutated (e.g., substantially similar sequences) or derivatized form thereof), so long as at least one function and/or activity of the unmodified (e.g., naturally-occurring) molecule remains.

[0121] In some embodiments, the multifunctional molecule includes a stromal modifying moiety. A “stromal modifying moiety,” as used herein refers to an agent, e.g., a protein (e.g., an enzyme), that is capable of altering, e.g., degrading a component of, the stroma. In embodiments, the component of the stroma is chosen from, e.g., an ECM component, e.g., a glycosaminoglycan, e.g., hyaluronan (also known as hyaluronic acid or HA), chondroitin sulfate, chondroitin, dermatan sulfate, heparin sulfate, heparin, entactin, tenascin, aggrecan and keratin sulfate; or an extracellular protein, e.g., collagen, laminin, elastin, fibrinogen, fibronectin, and vitronectin.

[0122] Certain terms are defined below.

[0123] As used herein, the articles “a” and “an” refer to one or more than one, e.g., to at least one, of the grammatical object of the article. The use of the words “a” or “an” when used in conjunction with the term “comprising” herein may mean “one,” but it is also consistent with the meaning of “one or more,” “at least one,” and “one or more than one.”

[0124] As used herein, “about” and “approximately” generally mean an acceptable degree of error for the quantity measured given the nature or precision of the measurements. Exemplary degrees of error are within 20 percent (%), typically, within 10%, and more typically, within 5% of a given range of values.

[0125] “Antibody molecule” as used herein refers to a protein, e.g., an immunoglobulin chain or fragment thereof, comprising at least one immunoglobulin variable domain sequence. An antibody molecule encompasses antibodies (e.g., full-length antibodies) and antibody fragments. In an embodiment, an antibody molecule comprises an antigen binding or functional fragment of a full length antibody, or a full length immunoglobulin chain. For example, a full-length antibody is an immunoglobulin (Ig) molecule (e.g., an IgG antibody) that is naturally occurring or formed by normal immunoglobulin gene fragment recombinatorial processes). In embodiments, an antibody molecule refers to an immunologically active, antigen-binding portion of an immunoglobulin molecule, such as an antibody fragment. An antibody fragment, e.g., functional fragment, is a portion of an antibody, e.g., Fab, Fab′, F(ab′)₂, F(ab)₂, variable fragment (Fv), domain antibody (dAb), or single chain variable fragment (scFv). A functional antibody fragment binds to the same antigen as that recognized by the intact (e.g., full-length) antibody. The terms “antibody fragment” or “functional fragment” also include isolated fragments consisting of the variable regions, such as the “Fv” fragments consisting of the variable regions of the heavy and light chains or recombinant single chain polypeptide molecules in which light and heavy variable regions are connected by a peptide linker (“scFv proteins”). In some embodiments, an antibody fragment does not include portions of antibodies without antigen binding activity, such as Fc fragments or single amino acid residues. Exemplary antibody molecules include full length antibodies and antibody fragments, e.g., dAb (domain antibody), single chain, Fab, Fab′, and F(ab′)₂ fragments, and single chain variable fragments (scFvs).

[0126] As used herein, an “immunoglobulin variable domain sequence” refers to an amino acid sequence which can form the structure of an immunoglobulin variable domain. For example, the sequence may include all or part of the amino acid sequence of a naturally occurring variable domain. For example, the sequence may or may not include one, two, or more N- or C-terminal amino acids, or may include other alterations that are compatible with formation of the protein structure.

[0127] In embodiments, an antibody molecule is monospecific, e.g., it comprises binding specificity for a single epitope. In some embodiments, an antibody molecule is multispecific, e.g., it comprises a plurality of immunoglobulin variable domain sequences, where a first immunoglobulin variable domain sequence has binding specificity for a first epitope and a second immunoglobulin variable domain sequence has binding specificity for a second epitope. In some embodiments, an antibody molecule is a bispecific antibody molecule. “Bispecific antibody molecule” as used herein refers to an antibody molecule that has specificity for more than one (e.g., two, three, four, or more) epitope and/or antigen.

[0128] “Antigen” (Ag) as used herein refers to a molecule that can provoke an immune response, e.g., involving activation of certain immune cells and/or antibody generation. Any macromolecule, including almost all proteins or peptides, can be an antigen. Antigens can also be derived from genomic recombinant or DNA. For example, any DNA comprising a nucleotide sequence or a partial nucleotide sequence that encodes a protein capable of eliciting an immune response encodes an “antigen.” In embodiments, an antigen does not need to be encoded solely by a full length nucleotide sequence of a gene, nor does an antigen need to be encoded by a gene at all. In embodiments, an antigen can be synthesized or can be derived from a biological sample, e.g., a tissue sample, a tumor sample, a cell, or a fluid with other biological components. As used, herein a “tumor antigen” or interchangeably, a “cancer antigen” includes any molecule present on, or associated with, a cancer, e.g., a cancer cell or a tumor microenvironment that can provoke an immune response. As used, herein an “immune cell antigen” includes any molecule present on, or associated with, an immune cell that can provoke an immune response.

[0129] The “antigen-binding site,” or “binding portion” of an antibody molecule refers to the part of an antibody molecule, e.g., an immunoglobulin (Ig) molecule, that participates in antigen binding. In embodiments, the antigen binding site is formed by amino acid residues of the variable (V) regions of the heavy (H) and light (L) chains. Three highly divergent stretches within the variable regions of the heavy and light chains, referred to as hypervariable regions, are disposed between more conserved flanking stretches called “framework regions,” (FRs). FRs are amino acid sequences that are naturally found between, and adjacent to, hypervariable regions in immunoglobulins. In embodiments, in an antibody molecule, the three hypervariable regions of a light chain and the three hypervariable regions of a heavy chain are disposed relative to each other in three dimensional space to form an antigen-binding surface, which is complementary to the three-dimensional surface of a bound antigen. The three hypervariable regions of each of the heavy and light chains are referred to as “complementarity-determining regions,” or “CDRs.” The framework region and CDRs have been defined and described, e.g., in Kabat, E. A., et al. (1991) Sequences of Proteins of Immunological Interest, Fifth Edition, U.S. Department of Health and Human Services, NIH Publication No. 91-3242, and Chothia, C. et al. (1987) J. Mol. Biol. 196:901-917. Each variable chain (e.g., variable heavy chain and variable light chain) is typically made up of three CDRs and four FRs, arranged from amino-terminus to carboxy-terminus in the amino acid order: FR1, CDR1, FR2, CDR2, FR3, CDR3, and FR4.

[0130] “Cancer” as used herein can encompass all types of oncogenic processes and/or cancerous growths. In embodiments, cancer includes primary tumors as well as metastatic tissues or malignantly transformed cells, tissues, or organs. In embodiments, cancer encompasses all histopathologies and stages, e.g., stages of invasiveness/severity, of a cancer. In embodiments, cancer includes relapsed and/or resistant cancer. The terms “cancer” and “tumor” can be used interchangeably. For example, both terms encompass solid and liquid tumors. As used herein, the term “cancer” or “tumor” includes premalignant, as well as malignant cancers and tumors.

[0131] As used herein, an “immune cell” refers to any of various cells that function in the immune system, e.g., to protect against agents of infection and foreign matter. In embodiments, this term includes leukocytes, e.g., neutrophils, eosinophils, basophils, lymphocytes, and monocytes. Innate leukocytes include phagocytes (e.g., macrophages, neutrophils, and dendritic cells), mast cells, eosinophils, basophils, and natural killer cells. Innate leukocytes identify and eliminate pathogens, either by attacking larger pathogens through contact or by engulfing and then killing microorganisms, and are mediators in the activation of an adaptive immune response. The cells of the adaptive immune system are special types of leukocytes, called lymphocytes. B cells and T cells are important types of lymphocytes and are derived from hematopoietic stem cells in the bone marrow. B cells are involved in the humoral immune response, whereas T cells are involved in cell-mediated immune response. The term “immune cell” includes immune effector cells.

[0132] “Immune effector cell,” as that term is used herein, refers to a cell that is involved in an immune response, e.g., in the promotion of an immune effector response. Examples of immune effector cells include, but are not limited to, T cells, e.g., alpha/beta T cells and gamma/delta T cells, B cells, natural killer (NK) cells, natural killer T (NK T) cells, and mast cells.

[0133] The term “effector function” or “effector response” refers to a specialized function of a cell. Effector function of a T cell, for example, may be cytolytic activity or helper activity including the secretion of cytokines.

[0134] The compositions and methods of the present invention encompass polypeptides and nucleic acids having the sequences specified, or sequences substantially identical or similar thereto, e.g., sequences at least 80%, 85%, 90%, 95% identical or higher to the sequence specified. In the context of an amino acid sequence, the term “substantially identical” is used herein to refer to a first amino acid that contains a sufficient or minimum number of amino acid residues that are i) identical to, or ii) conservative substitutions of aligned amino acid residues in a second amino acid sequence such that the first and second amino acid sequences can have a common structural domain and/or common functional activity. For example, amino acid sequences that contain a common structural domain having at least about 80%, 85%, 90%. 91%, 92%, 93%, 94%, 95%, 96%, 97%, 98% or 99% identity to a reference sequence, e.g., a sequence provided herein.

[0135] In the context of nucleotide sequence, the term “substantially identical” is used herein to refer to a first nucleic acid sequence that contains a sufficient or minimum number of nucleotides that are identical to aligned nucleotides in a second nucleic acid sequence such that the first and second nucleotide sequences encode a polypeptide having common functional activity, or encode a common structural polypeptide domain or a common functional polypeptide activity. For example, nucleotide sequences having at least about 80%, 85%, 90%, 91%, 92%, 93%, 94%, 95%, 96%, 97%, 98% or 99% identity to a reference sequence, e.g., a sequence provided herein.

[0136] The term “variant” refers to a polypeptide that has a substantially identical amino acid sequence to a reference amino acid sequence, or is encoded by a substantially identical nucleotide sequence. In some embodiments, the variant is a functional variant.

[0137] The term “functional variant” refers to a polypeptide that has a substantially identical amino acid sequence to a reference amino acid sequence, or is encoded by a substantially identical nucleotide sequence, and is capable of having one or more activities of the reference amino acid sequence.

[0138] Calculations of homology or sequence identity between sequences (the terms are used interchangeably herein) are performed as follows.

[0139] To determine the percent identity of two amino acid sequences, or of two nucleic acid sequences, the sequences are aligned for optimal comparison purposes (e.g., gaps can be introduced in one or both of a first and a second amino acid or nucleic acid sequence for optimal alignment and non-homologous sequences can be disregarded for comparison purposes). In a preferred embodiment, the length of a reference sequence aligned for comparison purposes is at least 30%, preferably at least 40%, more preferably at least 50%, 60%, and even more preferably at least 70%, 80%, 90%, 100% of the length of the reference sequence. The amino acid residues or nucleotides at corresponding amino acid positions or nucleotide positions are then compared. When a position in the first sequence is occupied by the same amino acid residue or nucleotide as the corresponding position in the second sequence, then the molecules are identical at that position (as used herein amino acid or nucleic acid “identity” is equivalent to amino acid or nucleic acid “homology”).

[0140] The percent identity between the two sequences is a function of the number of identical positions shared by the sequences, taking into account the number of gaps, and the length of each gap, which need to be introduced for optimal alignment of the two sequences.

[0141] The comparison of sequences and determination of percent identity between two sequences can be accomplished using a mathematical algorithm. In a preferred embodiment, the percent identity between two amino acid sequences is determined using the Needleman and Wunsch ((1970) J. Mol. Biol. 48:444-453) algorithm which has been incorporated into the GAP program in the GCG software package (available at gcg.com), using either a Blossum 62 matrix or a PAM250 matrix, and a gap weight of 16, 14, 12, 10, 8, 6, or 4 and a length weight of 1, 2, 3, 4, 5, or 6. In yet another preferred embodiment, the percent identity between two nucleotide sequences is determined using the GAP program in the GCG software package (available at gcg.com), using a NWSgapdna.CMP matrix and a gap weight of 40, 50, 60, 70, or 80 and a length weight of 1, 2, 3, 4, 5, or 6. A particularly preferred set of parameters (and the one that should be used unless otherwise specified) are a Blossum 62 scoring matrix with a gap penalty of 12, a gap extend penalty of 4, and a frameshift gap penalty of 5.

[0142] The percent identity between two amino acid or nucleotide sequences can be determined using the algorithm of E. Meyers and W. Miller ((1989) CABIOS, 4:11-17) which has been incorporated into the ALIGN program (version 2.0), using a PAM120 weight residue table, a gap length penalty of 12 and a gap penalty of 4.

[0143] The nucleic acid and protein sequences described herein can be used as a “query sequence” to perform a search against public databases to, for example, identify other family members or related sequences. Such searches can be performed using the NBLAST and XBLAST programs (version 2.0) of Altschul, et al. (1990) J. Mol. Biol. 215:403-10. BLAST nucleotide searches can be performed with the NBLAST program, score=100, wordlength=12 to obtain nucleotide sequences homologous to a nucleic acid molecule of the invention. BLAST protein searches can be performed with the XBLAST program, score=50, wordlength=3 to obtain amino acid sequences homologous to protein molecules of the invention. To obtain gapped alignments for comparison purposes, Gapped BLAST can be utilized as described in Altschul et al., (1997) Nucleic Acids Res. 25:3389-3402. When utilizing BLAST and Gapped BLAST programs, the default parameters of the respective programs (e.g., XBLAST and NBLAST) can be used. See ncbi.nlm.nih.gov.

[0144] It is understood that the molecules of the present invention may have additional conservative or non-essential amino acid substitutions, which do not have a substantial effect on their functions.

[0145] The term “amino acid” is intended to embrace all molecules, whether natural or synthetic, which include both an amino functionality and an acid functionality and capable of being included in a polymer of naturally occurring amino acids. Exemplary amino acids include naturally occurring amino acids; analogs, derivatives and congeners thereof, amino acid analogs having variant side chains; and all stereoisomers of any of any of the foregoing. As used herein the term “amino acid” includes both the D- or L-optical isomers and peptidomimetics.

[0146] A “conservative amino acid substitution” is one in which the amino acid residue is replaced with an amino acid residue having a similar side chain. Families of amino acid residues having similar side chains have been defined in the art. These families include amino acids with basic side chains (e.g., lysine, arginine, histidine), acidic side chains (e.g., aspartic acid, glutamic acid), uncharged polar side chains (e.g., glycine, asparagine, glutamine, serine, threonine, tyrosine, cysteine), nonpolar side chains (e.g., alanine, valine, leucine, isoleucine, proline, phenylalanine, methionine, tryptophan), beta-branched side chains (e.g., threonine, valine, isoleucine) and aromatic side chains (e.g., tyrosine, phenylalanine, tryptophan, histidine).

[0147] The terms “polypeptide”, “peptide” and “protein” (if single chain) are used interchangeably herein to refer to polymers of amino acids of any length. The polymer may be linear or branched, it may comprise modified amino acids, and it may be interrupted by non-amino acids. The terms also encompass an amino acid polymer that has been modified; for example, disulfide bond formation, glycosylation, lipidation, acetylation, phosphorylation, or any other manipulation, such as conjugation with a labeling component. The polypeptide can be isolated from natural sources, can be a produced by recombinant techniques from a eukaryotic or prokaryotic host, or can be a product of synthetic procedures.

[0148] The terms “nucleic acid,” “nucleic acid sequence,” “nucleotide sequence,” or “polynucleotide sequence,” and “polynucleotide” are used interchangeably. They refer to a polymeric form of nucleotides of any length, either deoxyribonucleotides or ribonucleotides, or analogs thereof. The polynucleotide may be either single-stranded or double-stranded, and if single-stranded may be the coding strand or non-coding (antisense) strand. A polynucleotide may comprise modified nucleotides, such as methylated nucleotides and nucleotide analogs. The sequence of nucleotides may be interrupted by non-nucleotide components. A polynucleotide may be further modified after polymerization, such as by conjugation with a labeling component. The nucleic acid may be a recombinant polynucleotide, or a polynucleotide of genomic, cDNA, semisynthetic, or synthetic origin which either does not occur in nature or is linked to another polynucleotide in a non-natural arrangement.

[0149] The term “isolated,” as used herein, refers to material that is removed from its original or native environment (e.g., the natural environment if it is naturally occurring). For example, a naturally occurring polynucleotide or polypeptide present in a living animal is not isolated, but the same polynucleotide or polypeptide, separated by human intervention from some or all of the co-existing materials in the natural system, is isolated. Such polynucleotides could be part of a vector and/or such polynucleotides or polypeptides could be part of a composition, and still be isolated in that such vector or composition is not part of the environment in which it is found in nature.

[0150] Various aspects of the invention are described in further detail below. Additional definitions are set out throughout the specification.

### Antibody Molecules

[0151] In one embodiment, the antibody molecule binds to a cancer antigen, e.g., a tumor antigen or a stromal antigen. In some embodiments, the cancer antigen is, e.g., a mammalian, e.g., a human, cancer antigen. In other embodiments, the antibody molecule binds to an immune cell antigen, e.g., a mammalian, e.g., a human, immune cell antigen. For example, the antibody molecule binds specifically to an epitope, e.g., linear or conformational epitope, on the cancer antigen or the immune cell antigen.

[0152] In an embodiment, an antibody molecule is a monospecific antibody molecule and binds a single epitope. E.g., a monospecific antibody molecule having a plurality of immunoglobulin variable domain sequences, each of which binds the same epitope.

[0153] In an embodiment an antibody molecule is a multispecific or multifunctional antibody molecule, e.g., it comprises a plurality of immunoglobulin variable domains sequences, wherein a first immunoglobulin variable domain sequence of the plurality has binding specificity for a first epitope and a second immunoglobulin variable domain sequence of the plurality has binding specificity for a second epitope. In an embodiment the first and second epitopes are on the same antigen, e.g., the same protein (or subunit of a multimeric protein). In an embodiment the first and second epitopes overlap. In an embodiment the first and second epitopes do not overlap. In an embodiment the first and second epitopes are on different antigens, e.g., the different proteins (or different subunits of a multimeric protein). In an embodiment a multispecific antibody molecule comprises a third, fourth or fifth immunoglobulin variable domain. In an embodiment, a multispecific antibody molecule is a bispecific antibody molecule, a trispecific antibody molecule, or a tetraspecific antibody molecule.

[0154] In an embodiment a multispecific antibody molecule is a bispecific antibody molecule. A bispecific antibody has specificity for no more than two antigens. A bispecific antibody molecule is characterized by a first immunoglobulin variable domain sequence which has binding specificity for a first epitope and a second immunoglobulin variable domain sequence that has binding specificity for a second epitope. In an embodiment the first and second epitopes are on the same antigen, e.g., the same protein (or subunit of a multimeric protein). In an embodiment the first and second epitopes overlap. In an embodiment the first and second epitopes do not overlap. In an embodiment the first and second epitopes are on different antigens, e.g., the different proteins (or different subunits of a multimeric protein). In an embodiment a bispecific antibody molecule comprises a heavy chain variable domain sequence and a light chain variable domain sequence which have binding specificity for a first epitope and a heavy chain variable domain sequence and a light chain variable domain sequence which have binding specificity for a second epitope. In an embodiment a bispecific antibody molecule comprises a half antibody having binding specificity for a first epitope and a half antibody having binding specificity for a second epitope. In an embodiment a bispecific antibody molecule comprises a half antibody, or fragment thereof, having binding specificity for a first epitope and a half antibody, or fragment thereof, having binding specificity for a second epitope. In an embodiment a bispecific antibody molecule comprises a scFv or a Fab, or fragment thereof, have binding specificity for a first epitope and a scFv or a Fab, or fragment thereof, have binding specificity for a second epitope.

[0155] In an embodiment, an antibody molecule comprises a diabody, and a single-chain molecule, as well as an antigen-binding fragment of an antibody (e.g., Fab, F(ab′)₂, and Fv). For example, an antibody molecule can include a heavy (H) chain variable domain sequence (abbreviated herein as VH), and a light (L) chain variable domain sequence (abbreviated herein as VL). In an embodiment an antibody molecule comprises or consists of a heavy chain and a light chain (referred to herein as a half antibody. In another example, an antibody molecule includes two heavy (H) chain variable domain sequences and two light (L) chain variable domain sequence, thereby forming two antigen binding sites, such as Fab, Fab′, F(ab′)₂, Fc, Fd, Fd′, Fv, single chain antibodies (scFv for example), single variable domain antibodies, diabodies (Dab) (bivalent and bispecific), and chimeric (e.g., humanized) antibodies, which may be produced by the modification of whole antibodies or those synthesized de novo using recombinant DNA technologies. These functional antibody fragments retain the ability to selectively bind with their respective antigen or receptor. Antibodies and antibody fragments can be from any class of antibodies including, but not limited to, IgG, IgA, IgM, IgD, and IgE, and from any subclass (e.g., IgG1, IgG2, IgG3, and IgG4) of antibodies. A preparation of antibody molecules can be monoclonal or polyclonal. An antibody molecule can also be a human, humanized, CDR-grafted, or in vitro generated antibody. The antibody can have a heavy chain constant region chosen from, e.g., IgG1, IgG2, IgG3, or IgG4. The antibody can also have a light chain chosen from, e.g., kappa or lambda. The term “immunoglobulin” (Ig) is used interchangeably with the term “antibody” herein.

[0156] Examples of antigen-binding fragments of an antibody molecule include: (i) a Fab fragment, a monovalent fragment consisting of the VL, VH, CL and CH1 domains; (ii) a F(ab′)2 fragment, a bivalent fragment comprising two Fab fragments linked by a disulfide bridge at the hinge region; (iii) a Fd fragment consisting of the VH and CH1 domains; (iv) a Fv fragment consisting of the VL and VH domains of a single arm of an antibody, (v) a diabody (dAb) fragment, which consists of a VH domain; (vi) a camelid or camelized variable domain; (vii) a single chain Fv (scFv), see e.g., Bird et al. (1988) Science 242:423-426; and Huston et al. (1988) Proc. Natl. Acad. Sci. USA 85:5879-5883); (viii) a single domain antibody. These antibody fragments are obtained using conventional techniques known to those with skill in the art, and the fragments are screened for utility in the same manner as are intact antibodies.

[0157] Antibody molecules include intact molecules as well as functional fragments thereof. Constant regions of the antibody molecules can be altered, e.g., mutated, to modify the properties of the antibody (e.g., to increase or decrease one or more of: Fc receptor binding, antibody glycosylation, the number of cysteine residues, effector cell function, or complement function).

[0158] Antibody molecules can also be single domain antibodies. Single domain antibodies can include antibodies whose complementary determining regions are part of a single domain polypeptide. Examples include, but are not limited to, heavy chain antibodies, antibodies naturally devoid of light chains, single domain antibodies derived from conventional 4-chain antibodies, engineered antibodies and single domain scaffolds other than those derived from antibodies. Single domain antibodies may be any of the art, or any future single domain antibodies. Single domain antibodies may be derived from any species including, but not limited to mouse, human, camel, llama, fish, shark, goat, rabbit, and bovine. According to another aspect of the invention, a single domain antibody is a naturally occurring single domain antibody known as heavy chain antibody devoid of light chains. Such single domain antibodies are disclosed in WO 9404678, for example. For clarity reasons, this variable domain derived from a heavy chain antibody naturally devoid of light chain is known herein as a VHH or nanobody to distinguish it from the conventional VH of four chain immunoglobulins. Such a VHH molecule can be derived from antibodies raised in Camelidae species, for example in camel, llama, dromedary, alpaca and guanaco. Other species besides Camelidae may produce heavy chain antibodies naturally devoid of light chain; such VHHs are within the scope of the invention.

[0159] The VH and VL regions can be subdivided into regions of hypervariability, termed “complementarity determining regions” (CDR), interspersed with regions that are more conserved, termed “framework regions” (FR or FW).

[0160] The extent of the framework region and CDRs has been precisely defined by a number of methods (see, Kabat, E. A., et al. (1991) Sequences of Proteins of Immunological Interest, Fifth Edition, U.S. Department of Health and Human Services, NIH Publication No. 91-3242; Chothia, C. et al. (1987) J. Mol. Biol. 196:901-917; and the AbM definition used by Oxford Molecular's AbM antibody modeling software. See, generally, e.g., Protein Sequence and Structure Analysis of Antibody Variable Domains. In: Antibody Engineering Lab Manual (Ed.: Duebel, S. and Kontermann, R., Springer-Verlag, Heidelberg).

[0161] The terms “complementarity determining region,” and “CDR,” as used herein refer to the sequences of amino acids within antibody variable regions which confer antigen specificity and binding affinity. In general, there are three CDRs in each heavy chain variable region (HCDR1, HCDR2, HCDR3) and three CDRs in each light chain variable region (LCDR1, LCDR2, LCDR3).

[0162] The precise amino acid sequence boundaries of a given CDR can be determined using any of a number of known schemes, including those described by Kabat et al. (1991), “Sequences of Proteins of Immunological Interest,” 5th Ed. Public Health Service, National Institutes of Health, Bethesda, MD (“Kabat” numbering scheme), Al-Lazikani et al., (1997) JMB 273,927-948 (“Chothia” numbering scheme). As used herein, the CDRs defined according the “Chothia” number scheme are also sometimes referred to as “hypervariable loops.”

[0163] For example, under Kabat, the CDR amino acid residues in the heavy chain variable domain (VH) are numbered 31-35 (HCDR1), 50-65 (HCDR2), and 95-102 (HCDR3); and the CDR amino acid residues in the light chain variable domain (VL) are numbered 24-34 (LCDR1), 50-56 (LCDR2), and 89-97 (LCDR3). Under Chothia, the CDR amino acids in the VH are numbered 26-32 (HCDR1), 52-56 (HCDR2), and 95-102 (HCDR3); and the amino acid residues in VL are numbered 26-32 (LCDR1), 50-52 (LCDR2), and 91-96 (LCDR3).

[0164] Each VH and VL typically includes three CDRs and four FRs, arranged from amino-terminus to carboxy-terminus in the following order: FR1, CDR1, FR2, CDR2, FR3, CDR3, FR4.

[0165] The antibody molecule can be a polyclonal or a monoclonal antibody.

[0166] The terms “monoclonal antibody” or “monoclonal antibody composition” as used herein refer to a preparation of antibody molecules of single molecular composition. A monoclonal antibody composition displays a single binding specificity and affinity for a particular epitope. A monoclonal antibody can be made by hybridoma technology or by methods that do not use hybridoma technology (e.g., recombinant methods).

[0167] The antibody can be recombinantly produced, e.g., produced by phage display or by combinatorial methods.

[0168] Phage display and combinatorial methods for generating antibodies are known in the art (as described in, e.g., Ladner et al. U.S. Pat. No. 5,223,409; Kang et al. International Publication No. WO 92/18619; Dower et al. International Publication No. WO 91/17271; Winter et al. International Publication WO 92/20791; Markland et al. International Publication No. WO 92/15679; Breitling et al. International Publication WO 93/01288; McCafferty et al. International Publication No. WO 92/01047; Garrard et al. International Publication No. WO 92/09690; Ladner et al. International Publication No. WO 90/02809; Fuchs et al. (1991) Bio Technology 9:1370-1372; Hay et al. (1992) Hum Antibod Hybridomas 3:81-85; Huse et al. (1989) Science 246:1275-1281; Griffths et al. (1993) EMBO J 12:725-734; Hawkins et al. (1992) JMol Biol 226:889-896; Clackson et al. (1991) Nature 352:624-628; Gram et al. (1992) PNAS 89:3576-3580; Garrad et al. (1991) Bio Technology 9:1373-1377; Hoogenboom et al. (1991) Nuc Acid Res 19:4133-4137; and Barbas et al. (1991) PNAS 88:7978-7982, the contents of all of which are incorporated by reference herein).

[0169] In one embodiment, the antibody is a fully human antibody (e.g., an antibody made in a mouse which has been genetically engineered to produce an antibody from a human immunoglobulin sequence), or a non-human antibody, e.g., a rodent (mouse or rat), goat, primate (e.g., monkey), camel antibody. Preferably, the non-human antibody is a rodent (mouse or rat antibody). Methods of producing rodent antibodies are known in the art.

[0170] Human monoclonal antibodies can be generated using transgenic mice carrying the human immunoglobulin genes rather than the mouse system. Splenocytes from these transgenic mice immunized with the antigen of interest are used to produce hybridomas that secrete human mAbs with specific affinities for epitopes from a human protein (see, e.g., Wood et al. International Application WO 91/00906, Kucherlapati et al. PCT publication WO 91/10741; Lonberg et al. International Application WO 92/03918; Kay et al. International Application 92/03917; Lonberg, N. et al. 1994 Nature 368:856-859; Green, L. L. et al. 1994 Nature Genet. 7:13-21; Morrison, S. L. et al. 1994 Proc. Natl. Acad. Sci. USA 81:6851-6855; Bruggeman et al. 1993 Year Immunol 7:33-40; Tuaillon et al. 1993 PNAS 90:3720-3724; Bruggeman et al. 1991 Eur J Immunol 21:1323-1326).

[0171] An antibody molecule can be one in which the variable region, or a portion thereof, e.g., the CDRs, are generated in a non-human organism, e.g., a rat or mouse. Chimeric, CDR-grafted, and humanized antibodies are within the invention. Antibody molecules generated in a non-human organism, e.g., a rat or mouse, and then modified, e.g., in the variable framework or constant region, to decrease antigenicity in a human are within the invention.

[0172] An “effectively human” protein is a protein that does substantially not evoke a neutralizing antibody response, e.g., the human anti-murine antibody (HAMA) response. HAMA can be problematic in a number of circumstances, e.g., if the antibody molecule is administered repeatedly, e.g., in treatment of a chronic or recurrent disease condition. A HAMA response can make repeated antibody administration potentially ineffective because of an increased antibody clearance from the serum (see, e.g., Saleh et al., Cancer Immunol. Immunother., 32:180-190 (1990)) and also because of potential allergic reactions (see, e.g., LoBuglio et al., Hybridoma, 5:5117-5123 (1986)).

[0173] Chimeric antibodies can be produced by recombinant DNA techniques known in the art (see Robinson et al., International Patent Publication PCT/US86/02269; Akira, et al., European Patent Application 184,187; Taniguchi, M., European Patent Application 171,496; Morrison et al., European Patent Application 173,494; Neuberger et al., International Application WO 86/01533; Cabilly et al. U.S. Pat. No. 4,816,567; Cabilly et al., European Patent Application 125,023; Better et al. (1988 Science 240:1041-1043); Liu et al. (1987) PNAS 84:3439-3443; Liu et al., 1987, J Immunol. 139:3521-3526; Sun et al. (1987) PNAS 84:214-218; Nishimura et al., 1987, Canc. Res. 47:999-1005; Wood et al. (1985) Nature 314:446-449; and Shaw et al., 1988, J Natl Cancer Inst. 80:1553-1559).

[0174] A humanized or CDR-grafted antibody will have at least one or two but generally all three recipient CDRs (of heavy and or light immuoglobulin chains) replaced with a donor CDR. The antibody may be replaced with at least a portion of a non-human CDR or only some of the CDRs may be replaced with non-human CDRs. It is only necessary to replace the number of CDRs required for binding to the antigen. Preferably, the donor will be a rodent antibody, e.g., a rat or mouse antibody, and the recipient will be a human framework or a human consensus framework. Typically, the immunoglobulin providing the CDRs is called the “donor” and the immunoglobulin providing the framework is called the “acceptor.” In one embodiment, the donor immunoglobulin is a non-human (e.g., rodent). The acceptor framework is a naturally occurring (e.g., a human) framework or a consensus framework, or a sequence about 85% or higher, preferably 90%, 95%, 99% or higher identical thereto.

[0175] As used herein, the term “consensus sequence” refers to the sequence formed from the most frequently occurring amino acids (or nucleotides) in a family of related sequences (See e.g., Winnaker, From Genes to Clones (Verlagsgesellschaft, Weinheim, Germany 1987). In a family of proteins, each position in the consensus sequence is occupied by the amino acid occurring most frequently at that position in the family. If two amino acids occur equally frequently, either can be included in the consensus sequence. A “consensus framework” refers to the framework region in the consensus immunoglobulin sequence.

[0176] An antibody molecule can be humanized by methods known in the art (see e.g., Morrison, S. L., 1985, Science 229:1202-1207, by Oi et al., 1986, BioTechniques 4:214, and by Queen et al. U.S. Pat. Nos. 5,585,089, 5,693,761 and 5,693,762, the contents of all of which are hereby incorporated by reference).

[0177] Humanized or CDR-grafted antibody molecules can be produced by CDR-grafting or CDR substitution, wherein one, two, or all CDRs of an immunoglobulin chain can be replaced. See e.g., U.S. Pat. No. 5,225,539; Jones et al. 1986 Nature 321:552-525; Verhoeyan et al. 1988 Science 239:1534; Beidler et al. 1988 J. Immunol. 141:4053-4060; Winter U.S. Pat. No. 5,225,539, the contents of all of which are hereby expressly incorporated by reference. Winter describes a CDR-grafting method which may be used to prepare the humanized antibodies of the present invention (UK Patent Application GB 2188638A, filed on Mar. 26, 1987; Winter U.S. Pat. No. 5,225,539), the contents of which is expressly incorporated by reference.

[0178] Also within the scope of the invention are humanized antibody molecules in which specific amino acids have been substituted, deleted or added. Criteria for selecting amino acids from the donor are described in U.S. Pat. No. 5,585,089, e.g., columns 12-16 of U.S. Pat. No. 5,585,089, e.g., columns 12-16 of U.S. Pat. No. 5,585,089, the contents of which are hereby incorporated by reference. Other techniques for humanizing antibodies are described in Padlan et al. EP 519596 A1, published on Dec. 23, 1992.

[0179] The antibody molecule can be a single chain antibody. A single-chain antibody (scFv) may be engineered (see, for example, Colcher, D. et al. (1999) Ann N Y Acad Sci 880:263-80; and Reiter, Y. (1996) Clin Cancer Res 2:245-52). The single chain antibody can be dimerized or multimerized to generate multivalent antibodies having specificities for different epitopes of the same target protein.

[0180] In yet other embodiments, the antibody molecule has a heavy chain constant region chosen from, e.g., the heavy chain constant regions of IgG1, IgG2, IgG3, IgG4, IgM, IgA1, IgA2, IgD, and IgE; particularly, chosen from, e.g., the (e.g., human) heavy chain constant regions of IgG1, IgG2, IgG3, and IgG4. In another embodiment, the antibody molecule has a light chain constant region chosen from, e.g., the (e.g., human) light chain constant regions of kappa or lambda. The constant region can be altered, e.g., mutated, to modify the properties of the antibody (e.g., to increase or decrease one or more of: Fc receptor binding, antibody glycosylation, the number of cysteine residues, effector cell function, and/or complement function). In one embodiment the antibody has: effector function; and can fix complement. In other embodiments the antibody does not; recruit effector cells; or fix complement. In another embodiment, the antibody has reduced or no ability to bind an Fc receptor. For example, it is a isotype or subtype, fragment or other mutant, which does not support binding to an Fc receptor, e.g., it has a mutagenized or deleted Fc receptor binding region.

[0181] Methods for altering an antibody constant region are known in the art. Antibodies with altered function, e.g. altered affinity for an effector ligand, such as FcR on a cell, or the C1 component of complement can be produced by replacing at least one amino acid residue in the constant portion of the antibody with a different residue (see e.g., EP 388,151 A1, U.S. Pat. Nos. 5,624,821 and 5,648,260, the contents of all of which are hereby incorporated by reference). Similar type of alterations could be described which if applied to the murine, or other species immunoglobulin would reduce or eliminate these functions.

[0182] An antibody molecule can be derivatized or linked to another functional molecule (e.g., another peptide or protein). As used herein, a “derivatized” antibody molecule is one that has been modified. Methods of derivatization include but are not limited to the addition of a fluorescent moiety, a radionucleotide, a toxin, an enzyme or an affinity ligand such as biotin. Accordingly, the antibody molecules of the invention are intended to include derivatized and otherwise modified forms of the antibodies described herein, including immunoadhesion molecules. For example, an antibody molecule can be functionally linked (by chemical coupling, genetic fusion, noncovalent association or otherwise) to one or more other molecular entities, such as another antibody (e.g., a bispecific antibody or a diabody), a detectable agent, a cytotoxic agent, a pharmaceutical agent, and/or a protein or peptide that can mediate association of the antibody or antibody portion with another molecule (such as a streptavidin core region or a polyhistidine tag).

[0183] One type of derivatized antibody molecule is produced by crosslinking two or more antibodies (of the same type or of different types, e.g., to create bispecific antibodies). Suitable crosslinkers include those that are heterobifunctional, having two distinctly reactive groups separated by an appropriate spacer (e.g., m-maleimidobenzoyl-N-hydroxysuccinimide ester) or homobifunctional (e.g., disuccinimidyl suberate). Such linkers are available from Pierce Chemical Company, Rockford, Ill.

### Multispecific or Multifunctional Antibody Molecules

[0184] Exemplary structures of multispecific and multifunctional molecules defined herein are described throughout. Exemplary structures are further described in: Weidle U et al. (2013) The Intriguing Options of Multispecific Antibody Formats for Treatment of Cancer. Cancer Genomics & Proteomics 10: 1-18 (2013); and Spiess C et al. (2015) Alternative molecular formats and therapeutic applications for bispecific antibodies. Molecular Immunology 67: 95-106; the full contents of each of which is incorporated by reference herein).

[0185] In embodiments, multispecific antibody molecules can comprise more than one antigen-binding site, where different sites are specific for different antigens. In embodiments, multispecific antibody molecules can bind more than one (e.g., two or more) epitopes on the same antigen. In embodiments, multispecific antibody molecules comprise an antigen-binding site specific for a target cell (e.g., cancer cell) and a different antigen-binding site specific for an immune effector cell. In one embodiment, the multispecific antibody molecule is a bispecific antibody molecule. Bispecific antibody molecules can be classified into five different structural groups: (i) bispecific immunoglobulin G (BsIgG); (ii) IgG appended with an additional antigen-binding moiety; (iii) bispecific antibody fragments; (iv) bispecific fusion proteins; and (v) bispecific antibody conjugates.

[0186] BsIgG is a format that is monovalent for each antigen. Exemplary BsIgG formats include but are not limited to crossMab, DAF (two-in-one), DAF (four-in-one), DutaMab, DT-IgG, knobs-in-holes common LC, knobs-in-holes assembly, charge pair, Fab-arm exchange, SEEDbody, triomab, LUZ-Y, Fcab, κλ-body, orthogonal Fab. See Spiess et al. Mol. Immunol. 67(2015):95-106. Exemplary BsIgGs include catumaxomab (Fresenius Biotech, Trion Pharma, Neopharm), which contains an anti-CD3 arm and an anti-EpCAM arm; and ertumaxomab (Neovii Biotech, Fresenius Biotech), which targets CD3 and HER2. In some embodiments, BsIgG comprises heavy chains that are engineered for heterodimerization. For example, heavy chains can be engineered for heterodimerization using a “knobs-into-holes” strategy, a SEED platform, a common heavy chain (e.g., in κλ-bodies), and use of heterodimeric Fc regions. See Spiess et al. Mol. Immunol. 67(2015):95-106. Strategies that have been used to avoid heavy chain pairing of homodimers in BsIgG include knobs-in-holes, duobody, azymetric, charge pair, HA-TF, SEEDbody, and differential protein A affinity. See Id. BsIgG can be produced by separate expression of the component antibodies in different host cells and subsequent purification/assembly into a BsIgG. BsIgG can also be produced by expression of the component antibodies in a single host cell. BsIgG can be purified using affinity chromatography, e.g., using protein A and sequential pH elution.

[0187] IgG appended with an additional antigen-binding moiety is another format of bispecific antibody molecules. For example, monospecific IgG can be engineered to have bispecificity by appending an additional antigen-binding unit onto the monospecific IgG, e.g., at the N- or C-terminus of either the heavy or light chain. Exemplary additional antigen-binding units include single domain antibodies (e.g., variable heavy chain or variable light chain), engineered protein scaffolds, and paired antibody variable domains (e.g., single chain variable fragments or variable fragments). See Id. Examples of appended IgG formats include dual variable domain IgG (DVD-Ig), IgG(H)-scFv, scFv-(H)IgG, IgG(L)-scFv, scFv-(L)IgG, IgG(L,H)-Fv, IgG(H)-V, V(H)—IgG, IgG(L)-V, V(L)-IgG, KIH IgG-scFab, 2scFv-IgG, IgG-2scFv, scFv4-Ig, zybody, and DVI-IgG (four-in-one). See Spiess et al. Mol. Immunol. 67(2015):95-106. An example of an IgG-scFv is MM-141 (Merrimack Pharmaceuticals), which binds IGF-1R and HER3. Examples of DVD-Ig include ABT-981 (AbbVie), which binds IL-1α and IL-1β; and ABT-122 (AbbVie), which binds TNF and IL-17A.

[0188] Bispecific antibody fragments (BsAb) are a format of bispecific antibody molecules that lack some or all of the antibody constant domains. For example, some BsAb lack an Fc region. In embodiments, bispecific antibody fragments include heavy and light chain regions that are connected by a peptide linker that permits efficient expression of the BsAb in a single host cell. Exemplary bispecific antibody fragments include but are not limited to nanobody, nanobody-HAS, BiTE, Diabody, DART, TandAb, scDiabody, scDiabody-CH3, Diabody-CH3, triple body, miniantibody, minibody, TriBi minibody, scFv-CH3 KIH, Fab-scFv, scFv-CH-CL-scFv, F(ab′)2, F(ab′)2-scFv2, scFv-KIH, Fab-scFv-Fc, tetravalent HCAb, scDiabody-Fc, Diabody-Fc, tandem scFv-Fc, and intrabody. See Id. For example, the BiTE format comprises tandem scFvs, where the component scFvs bind to CD3 on T cells and a surface antigen on cancer cells

[0189] Bispecific fusion proteins include antibody fragments linked to other proteins, e.g., to add additional specificity and/or functionality. An example of a bispecific fusion protein is an immTAC, which comprises an anti-CD3 scFv linked to an affinity-matured T-cell receptor that recognizes HLA-presented peptides. In embodiments, the dock-and-lock (DNL) method can be used to generate bispecific antibody molecules with higher valency. Also, fusions to albumin binding proteins or human serum albumin can be extend the serum half-life of antibody fragments. See Id.

[0190] In embodiments, chemical conjugation, e.g., chemical conjugation of antibodies and/or antibody fragments, can be used to create BsAb molecules. See Id. An exemplary bispecific antibody conjugate includes the CovX-body format, in which a low molecular weight drug is conjugated site-specifically to a single reactive lysine in each Fab arm or an antibody or fragment thereof. In embodiments, the conjugation improves the serum half-life of the low molecular weight drug. An exemplary CovX-body is CVX-241 (NCT01004822), which comprises an antibody conjugated to two short peptides inhibiting either VEGF or Ang2. See Id.

[0191] The antibody molecules can be produced by recombinant expression, e.g., of at least one or more component, in a host system. Exemplary host systems include eukaryotic cells (e.g., mammalian cells, e.g., CHO cells, or insect cells, e.g., SF9 or S2 cells) and prokaryotic cells (e.g., E. coli). Bispecific antibody molecules can be produced by separate expression of the components in different host cells and subsequent purification/assembly. Alternatively, the antibody molecules can be produced by expression of the components in a single host cell. Purification of bispecific antibody molecules can be performed by various methods such as affinity chromatography, e.g., using protein A and sequential pH elution. In other embodiments, affinity tags can be used for purification, e.g., histidine-containing tag, myc tag, or streptavidin tag.

### CDR-Grafted Scaffolds

[0192] In embodiments, the antibody molecule is a CDR-grafted scaffold domain. In embodiments, the scaffold domain is based on a fibronectin domain, e.g., fibronectin type III domain. The overall fold of the fibronectin type III (Fn3) domain is closely related to that of the smallest functional antibody fragment, the variable domain of the antibody heavy chain. There are three loops at the end of Fn3; the positions of BC, DE and FG loops approximately correspond to those of CDR1, 2 and 3 of the VH domain of an antibody. Fn3 does not have disulfide bonds; and therefore Fn3 is stable under reducing conditions, unlike antibodies and their fragments (see, e.g., WO 98/56915; WO 01/64942; WO 00/34784). An Fn3 domain can be modified (e.g., using CDRs or hypervariable loops described herein) or varied, e.g., to select domains that bind to an antigen/marker/cell described herein.

[0193] In embodiments, a scaffold domain, e.g., a folded domain, is based on an antibody, e.g., a “minibody” scaffold created by deleting three beta strands from a heavy chain variable domain of a monoclonal antibody (see, e.g., Tramontano et al., 1994, J Mol. Recognit. 7:9; and Martin et al., 1994, EMBO J. 13:5303-5309). The “minibody” can be used to present two hypervariable loops. In embodiments, the scaffold domain is a V-like domain (see, e.g., Coia et al. WO 99/45110) or a domain derived from tendamistatin, which is a 74 residue, six-strand beta sheet sandwich held together by two disulfide bonds (see, e.g., McConnell and Hoess, 1995, J Mol. Biol. 250:460). For example, the loops of tendamistatin can be modified (e.g., using CDRs or hypervariable loops) or varied, e.g., to select domains that bind to a marker/antigen/cell described herein. Another exemplary scaffold domain is a beta-sandwich structure derived from the extracellular domain of CTLA-4 (see, e.g., WO 00/60070).

[0194] Other exemplary scaffold domains include but are not limited to T-cell receptors; MHC proteins; extracellular domains (e.g., fibronectin Type III repeats, EGF repeats); protease inhibitors (e.g., Kunitz domains, ecotin, BPTI, and so forth); TPR repeats; trifoil structures; zinc finger domains; DNA-binding proteins; particularly monomeric DNA binding proteins; RNA binding proteins; enzymes, e.g., proteases (particularly inactivated proteases), RNase; chaperones, e.g., thioredoxin, and heat shock proteins; and intracellular signaling domains (such as SH2 and SH3 domains). See, e.g., US 20040009530 and U.S. Pat. No. 7,501,121, incorporated herein by reference.

[0195] In embodiments, a scaffold domain is evaluated and chosen, e.g., by one or more of the following criteria: (1) amino acid sequence, (2) sequences of several homologous domains, (3) 3-dimensional structure, and/or (4) stability data over a range of pH, temperature, salinity, organic solvent, oxidant concentration. In embodiments, the scaffold domain is a small, stable protein domain, e.g., a protein of less than 100, 70, 50, 40 or 30 amino acids. The domain may include one or more disulfide bonds or may chelate a metal, e.g., zinc.

### Antibody-Based Fusions

[0196] A variety of formats can be generated which contain additional binding entities attached to the N or C terminus of antibodies. These fusions with single chain or disulfide stabilized Fvs or Fabs result in the generation of tetravalent molecules with bivalent binding specificity for each antigen. Combinations of scFvs and scFabs with IgGs enable the production of molecules which can recognize three or more different antigens.

### Antibody-Fab Fusion

[0197] Antibody-Fab fusions are bispecific antibodies comprising a traditional antibody to a first target and a Fab to a second target fused to the C terminus of the antibody heavy chain. Commonly the antibody and the Fab will have a common light chain. Antibody fusions can be produced by (1) engineering the DNA sequence of the target fusion, and (2) transfecting the target DNA into a suitable host cell to express the fusion protein. It seems like the antibody-scFv fusion may be linked by a (Gly)-Ser linker between the C-terminus of the CH3 domain and the N-terminus of the scFv, as described by Coloma, J. et al. (1997) Nature Biotech 15:159.

### Antibody-scFv Fusion

[0198] Antibody-scFv Fusions are bispecific antibodies comprising a traditional antibody and a scFv of unique specificity fused to the C terminus of the antibody heavy chain. The scFv can be fused to the C terminus through the Heavy Chain of the scFv either directly or through a linker peptide. Antibody fusions can be produced by (1) engineering the DNA sequence of the target fusion, and (2) transfecting the target DNA into a suitable host cell to express the fusion protein. It seems like the antibody-scFv fusion may be linked by a (Gly)-Ser linker between the C-terminus of the CH3 domain and the N-terminus of the scFv, as described by Coloma, J. et al. (1997) Nature Biotech 15:159.

### Variable Domain Immunoglobulin DVD

[0199] A related format is the dual variable domain immunoglobulin (DVD), which are composed of VH and VL domains of a second specificity place upon the N termini of the V domains by shorter linker sequences.

[0200] Other exemplary multispecific antibody formats include, e.g., those described in the following US20160114057A1, US20130243775A1, US20140051833, US20130022601, US20150017187A1, US20120201746A1, US20150133638A1, US20130266568A1, US20160145340A1, WO2015127158A1, US20150203591A1, US20140322221A1, US20130303396A1, US20110293613, US20130017200A1, US20160102135A1, WO2015197598A2, WO2015197582A1, U.S. Pat. No. 9,359,437, US20150018529, WO2016115274A1, WO2016087416A1, US20080069820A1, U.S. Pat. Nos. 9,145,588B, 7,919,257, and US20150232560A1. Exemplary multispecific molecules utilizing a full antibody-Fab/scFab format include those described in the following, U.S. Pat. No. 9,382,323B2, US20140072581A1, US20140308285A1, US20130165638A1, US20130267686A1, US20140377269A1, U.S. Pat. No. 7,741,446B2, and WO1995009917A1. Exemplary multispecific molecules utilizing a domain exchange format include those described in the following, US20150315296A1, WO2016087650A1, US20160075785A1, WO2016016299A1, US20160130347A1, US20150166670, U.S. Pat. No. 8,703,132B2, US20100316645, U.S. Pat. No. 8,227,577B2, US20130078249.

### Fc-Containing Entities (Mini-Antibodies)

[0201] Fc-containing entities, also known as mini-antibodies, can be generated by fusing scFv to the C-termini of constant heavy region domain 3 (CH3-scFv) and/or to the hinge region (scFv-hinge-Fc) of an antibody with a different specificity. Trivalent entities can also be made which have disulfide stabilized variable domains (without peptide linker) fused to the C-terminus of CH3 domains of IgGs.

### Fc-Containing Multispecific Molecules

[0202] In some embodiments, the multispecific molecules disclosed herein includes an immunoglobulin constant region (e.g., an Fc region). Exemplary Fc regions can be chosen from the heavy chain constant regions of IgG1, IgG2, IgG3 or IgG4; more particularly, the heavy chain constant region of human IgG1, IgG2, IgG3, or IgG4.

[0203] In some embodiments, the immunoglobulin chain constant region (e.g., the Fc region) is altered, e.g., mutated, to increase or decrease one or more of: Fc receptor binding, antibody glycosylation, the number of cysteine residues, effector cell function, or complement function.

[0204] In other embodiments, an interface of a first and second immunoglobulin chain constant regions (e.g., a first and a second Fc region) is altered, e.g., mutated, to increase or decrease dimerization, e.g., relative to a non-engineered interface, e.g., a naturally occurring interface. For example, dimerization of the immunoglobulin chain constant region (e.g., the Fc region) can be enhanced by providing an Fc interface of a first and a second Fc region with one or more of: a paired protuberance-cavity (“knob-in-a hole”), an electrostatic interaction, or a strand-exchange, such that a greater ratio of heteromultimer to homomultimer forms, e.g., relative to a non-engineered interface.

[0205] In some embodiments, the multispecific molecules include a paired amino acid substitution at a position chosen from one or more of 347, 349, 350, 351, 366, 368, 370, 392, 394, 395, 397, 398, 399, 405, 407, or 409, e.g., of the Fc region of human IgG1 For example, the immunoglobulin chain constant region (e.g., Fc region) can include a paired an amino acid substitution chosen from: T366S, L368A, or Y407V (e.g., corresponding to a cavity or hole), and T366W (e.g., corresponding to a protuberance or knob).

[0206] In other embodiments, the multifunctional molecule includes a half-life extender, e.g., a human serum albumin or an antibody molecule to human serum albumin.

### Heterodimerized Antibody Molecules & Methods of Making

[0207] Various methods of producing multispecific antibodies have been disclosed to address the problem of incorrect heavy chain pairing. Exemplary methods are described below. Exemplary multispecific antibody formats and methods of making said multispecific antibodies are also disclosed in e.g., Speiss et al. Molecular Immunology 67 (2015) 95-106; and Klein et al mAbs 4:6, 653-663; November/December 2012; the entire contents of each of which are incorporated by reference herein.

[0208] Heterodimerized bispecific antibodies are based on the natural IgG structure, wherein the two binding arms recognize different antigens. IgG derived formats that enable defined monovalent (and simultaneous) antigen binding are generated by forced heavy chain heterodimerization, combined with technologies that minimize light chain mispairing (e.g., common light chain). Forced heavy chain heterodimerization can be obtained using, e.g., knob-in-hole OR strand exchange engineered domains (SEED).

[0209] Knob-In-Hole

[0210] Knob-in-Hole as described in U.S. Pat. Nos. 5,731,116, 7,476,724 and Ridgway, J. et al. (1996) Prot. Engineering 9(7): 617-621, broadly involves: (1) mutating the CH3 domain of one or both antibodies to promote heterodimerization; and (2) combining the mutated antibodies under conditions that promote heterodimerization. “Knobs” or “protuberances” are typically created by replacing a small amino acid in a parental antibody with a larger amino acid (e.g., T366Y or T366W); “Holes” or “cavities” are created by replacing a larger residue in a parental antibody with a smaller amino acid (e.g., Y407T, T366S, L368A and/or Y407V).

[0211] For bispecific antibodies including an Fc domain, introduction of specific mutations into the constant region of the heavy chains to promote the correct heterodimerization of the Fc portion can be utilized. Several such techniques are reviewed in Klein et al. (mAbs (2012) 4:6, 1-11), the contents of which are incorporated herein by reference in their entirety. These techniques include the “knobs-into-holes” (KiH) approach which involves the introduction of a bulky residue into one of the CH3 domains of one of the antibody heavy chains. This bulky residue fits into a complementary “hole” in the other CH3 domain of the paired heavy chain so as to promote correct pairing of heavy chains (see e.g., U.S. Pat. No. 7,642,228).

[0212] Exemplary KiH mutations include S354C, T366W in the “knob” heavy chain and Y349C, T366S, L368A, Y407V in the “hole” heavy chain. Other exemplary KiH mutations are provided in Table 1, with additional optional stabilizing Fc cysteine mutations.

TABLE 1
Exemplary Fc KiH mutations and optional Cysteine mutations

| Position | Knob Mutation | Hole Mutation |
|---|---|---|
| T366 | T366W | T366S |
| L368 | — | L368A |
| Y407 | — | Y407V |

Additional Cysteine Mutations to form a stabilizing disulfide bridge

| Position | Knob CH3 | Hole CH3 |
|---|---|---|
| S354 | S354C | — |
| Y349 | — | Y349C |

[0213] Other Fc mutations are provided by Igawa and Tsunoda who identified 3 negatively charged residues in the CH3 domain of one chain that pair with three positively charged residues in the CH3 domain of the other chain. These specific charged residue pairs are: E356-K439, E357-K370, D399-K409 and vice versa. By introducing at least two of the following three mutations in chain A: E356K, E357K and D399K, as well as K370E, K409D, K439E in chain B, alone or in combination with newly identified disulfide bridges, they were able to favor very efficient heterodimerization while suppressing homodimerization at the same time (Martens T et al. A novel one-armed antic-Met antibody inhibits glioblastoma growth in vivo. Clin Cancer Res 2006; 12:6144-52; PMID: 17062691). Xencor defined 41 variant pairs based on combining structural calculations and sequence information that were subsequently screened for maximal heterodimerization, defining the combination of S364H, F405A (HA) on chain A and Y349T, T394F on chain B (TF) (Moore G L et al. A novel bispecific antibody format enables simultaneous bivalent and monovalent co-engagement of distinct target antigens. MAbs 2011; 3:546-57; PMID: 22123055).

[0214] Other exemplary Fc mutations to promote heterodimerization of multispecific antibodies include those described in the following references, the contents of each of which is incorporated by reference herein, WO2016071377A1, US20140079689A1, US20160194389A1, US20160257763, WO2016071376A2, WO2015107026A1, WO2015107025A1, WO2015107015A1, US20150353636A1, US20140199294A1, U.S. Pat. No. 7,750,128B2, US20160229915A1, US20150344570A1, U.S. Pat. No. 8,003,774A1, US20150337049A1, US20150175707A1, US20140242075A1, US20130195849A1, US20120149876A1, US20140200331A1, U.S. Pat. No. 9,309,311B2, U.S. Pat. No. 8,586,713, US20140037621A1, US20130178605A1, US20140363426A1, US20140051835A1 and US20110054151A1.

[0215] Stabilizing cysteine mutations have also been used in combination with KiH and other Fc heterodimerization promoting variants, see e.g., U.S. Pat. No. 7,183,076. Other exemplary cysteine modifications include, e.g., those disclosed in US20140348839A1, U.S. Pat. No. 7,855,275B2, and U.S. Pat. No. 9,000,130B2.

[0216] Strand Exchange Engineered Domains (SEED)

[0217] Heterodimeric Fc platform that support the design of bispecific and asymmetric fusion proteins by devising strand-exchange engineered domain (SEED) C(H)3 heterodimers are known. These derivatives of human IgG and IgA C(H)3 domains create complementary human SEED C(H)3 heterodimers that are composed of alternating segments of human IgA and IgG C(H)3 sequences. The resulting pair of SEED C(H)3 domains preferentially associates to form heterodimers when expressed in mammalian cells. SEEDbody (Sb) fusion proteins consist of [IgG1 hinge]-C(H)2-[SEED C(H)3], that may be genetically linked to one or more fusion partners (see e.g., Davis J H et al. SEEDbodies: fusion proteins based on strand exchange engineered domain (SEED) CH3 heterodimers in an Fc analogue platform for asymmetric binders or immunofusions and bispecific antibodies. Protein Eng Des Sel 2010; 23:195-202; PMID: 20299542 and U.S. Pat. No. 8,871,912. The contents of each of which are incorporated by reference herein).

[0218] Duobody

[0219] “Duobody” technology to produce bispecific antibodies with correct heavy chain pairing are known. The DuoBody technology involves three basic steps to generate stable bispecific human IgG1 antibodies in a post-production exchange reaction. In a first step, two IgG1s, each containing single matched mutations in the third constant (CH3) domain, are produced separately using standard mammalian recombinant cell lines. Subsequently, these IgG1 antibodies are purified according to standard processes for recovery and purification. After production and purification (post-production), the two antibodies are recombined under tailored laboratory conditions resulting in a bispecific antibody product with a very high yield (typically >95%) (see e.g., Labrijn et al, PNAS 2013; 110(13):5145-5150 and Labrijn et al. Nature Protocols 2014; 9(10):2450-63, the contents of each of which are incorporated by reference herein).

[0220] Electrostatic Interactions

[0221] Methods of making multispecific antibodies using CH3 amino acid changes with charged amino acids such that homodimer formation is electrostatically unfavorable are disclosed. EP1870459 and WO 2009089004 describe other strategies for favoring heterodimer formation upon co-expression of different antibody domains in a host cell. In these methods, one or more residues that make up the heavy chain constant domain 3 (CH3), CH3-CH3 interfaces in both CH3 domains are replaced with a charged amino acid such that homodimer formation is electrostatically unfavorable and heterodimerization is electrostatically favorable. Additional methods of making multispecific molecules using electrostatic interactions are described in the following references, the contents of each of which is incorporated by reference herein, include US20100015133, U.S. Pat. No. 8,592,562B2, U.S. Pat. No. 9,200,060B2, US20140154254A1, and U.S. Pat. No. 9,358,286A1.

[0222] Common Light Chain

[0223] Light chain mispairing needs to be avoided to generate homogenous preparations of bispecific IgGs. One way to achieve this is through the use of the common light chain principle, i.e. combining two binders that share one light chain but still have separate specificities. An exemplary method of enhancing the formation of a desired bispecific antibody from a mixture of monomers is by providing a common variable light chain to interact with each of the heteromeric variable heavy chain regions of the bispecific antibody. Compositions and methods of producing bispecific antibodies with a common light chain as disclosed in, e.g., U.S. Pat. No. 7,183,076B2, US20110177073A1, EP2847231A1, WO2016079081A1, and EP3055329A1, the contents of each of which is incorporated by reference herein.

[0224] CrossMab

[0225] Another option to reduce light chain mispairing is the CrossMab technology which avoids non-specific L chain mispairing by exchanging CH1 and CL domains in the Fab of one half of the bispecific antibody. Such crossover variants retain binding specificity and affinity, but make the two arms so different that L chain mispairing is prevented. The CrossMab technology (as reviewed in Klein et al. Supra) involves domain swapping between heavy and light chains so as to promote the formation of the correct pairings. Briefly, to construct a bispecific IgG-like CrossMab antibody that could bind to two antigens by using two distinct light chain-heavy chain pairs, a two-step modification process is applied. First, a dimerization interface is engineered into the C-terminus of each heavy chain using a heterodimerization approach, e.g., Knob-into-hole (KiH) technology, to ensure that only a heterodimer of two distinct heavy chains from one antibody (e.g., Antibody A) and a second antibody (e.g., Antibody B) is efficiently formed. Next, the constant heavy 1 (CH1) and constant light (CL) domains of one antibody are exchanged (Antibody A), keeping the variable heavy (VH) and variable light (VL) domains consistent. The exchange of the CH1 and CL domains ensured that the modified antibody (Antibody A) light chain would only efficiently dimerize with the modified antibody (antibody A) heavy chain, while the unmodified antibody (Antibody B) light chain would only efficiently dimerize with the unmodified antibody (Antibody B) heavy chain; and thus only the desired bispecific CrossMab would be efficiently formed (see e.g., Cain, C. SciBX 4(28); doi:10.1038/scibx.2011.783, the contents of which are incorporated by reference herein).

[0226] Common Heavy Chain

[0227] An exemplary method of enhancing the formation of a desired bispecific antibody from a mixture of monomers is by providing a common variable heavy chain to interact with each of the heteromeric variable light chain regions of the bispecific antibody. Compositions and methods of producing bispecific antibodies with a common heavy chain are disclosed in, e.g., US20120184716, US20130317200, and US20160264685A1, the contents of each of which is incorporated by reference herein.

[0228] Amino Acid Modifications

[0229] Alternative compositions and methods of producing multispecific antibodies with correct light chain pairing include various amino acid modifications. For example, Zymeworks describes heterodimers with one or more amino acid modifications in the CH1 and/or CL domains, one or more amino acid modifications in the VH and/or VL domains, or a combination thereof, which are part of the interface between the light chain and heavy chain and create preferential pairing between each heavy chain and a desired light chain such that when the two heavy chains and two light chains of the heterodimer pair are co-expressed in a cell, the heavy chain of the first heterodimer preferentially pairs with one of the light chains rather than the other (see e.g., WO2015181805). Other exemplary methods are described in WO2016026943 (Argen-X), US20150211001, US20140072581A1, US20160039947A1, and US20150368352.

[0230] Lambda Kappa Formats

[0231] Multispecific molecules (e.g., multispecific antibody molecules) that include the lambda light chain polypeptide and a kappa light chain polypeptide, can be used to allow for heterodimerization. Methods for generating bispecific antibody molecules comprising the lambda light chain polypeptide and a kappa light chain polypeptide are disclosed in PCT/US17/53053 filed on Sep. 22, 2017, incorporated herein by reference in its entirety.

[0232] In embodiments, the multispecific molecules includes a multispecific antibody molecule, e.g., an antibody molecule comprising two binding specificities, e.g., a bispecific antibody molecule. The multispecific antibody molecule includes:
[0233] a lambda light chain polypeptide 1 (LLCP1) specific for a first epitope;
   [0234] a heavy chain polypeptide 1 (HCP1) specific for the first epitope;
   [0235] a kappa light chain polypeptide 2 (KLCP2) specific for a second epitope; and
   [0236] a heavy chain polypeptide 2 (HCP2) specific for the second epitope.

[0237] “Lambda light chain polypeptide 1 (LLCP1)”, as that term is used herein, refers to a polypeptide comprising sufficient light chain (LC) sequence, such that when combined with a cognate heavy chain variable region, can mediate specific binding to its epitope and complex with an HCP1. In an embodiment it comprises all or a fragment of a CH1 region. In an embodiment, an LLCP1 comprises LC-CDR1, LC-CDR2, LC-CDR3, FR1, FR2, FR3, FR4, and CH1, or sufficient sequence therefrom to mediate specific binding of its epitope and complex with an HCP1. LLCP1, together with its HCP1, provide specificity for a first epitope (while KLCP2, together with its HCP2, provide specificity for a second epitope). As described elsewhere herein, LLCP1 has a higher affinity for HCP1 than for HCP2.

[0238] “Kappa light chain polypeptide 2 (KLCP2)”, as that term is used herein, refers to a polypeptide comprising sufficient light chain (LC) sequence, such that when combined with a cognate heavy chain variable region, can mediate specific binding to its epitope and complex with an HCP2. In an embodiment, it comprises all or a fragment of a CH1 region. In an embodiment, a KLCP2 comprises LC-CDR1, LC-CDR2, LC-CDR3, FR1, FR2, FR3, FR4, and CH1, or sufficient sequence therefrom to mediate specific binding of its epitope and complex with an HCP2. KLCP2, together with its HCP2, provide specificity for a second epitope (while LLCP1, together with its HCP1, provide specificity for a first epitope).

[0239] “Heavy chain polypeptide 1 (HCP1)”, as that term is used herein, refers to a polypeptide comprising sufficient heavy chain (HC) sequence, e.g., HC variable region sequence, such that when combined with a cognate LLCP1, can mediate specific binding to its epitope and complex with an HCP1. In an embodiment, it comprises all or a fragment of a CH1region. In an embodiment, it comprises all or a fragment of a CH2 and/or CH3 region. In an embodiment an HCP1 comprises HC-CDR1, HC-CDR2, HC-CDR3, FR1, FR2, FR3, FR4, CH1, CH2, and CH3, or sufficient sequence therefrom to: (i) mediate specific binding of its epitope and complex with an LLCP1, (ii) to complex preferentially, as described herein to LLCP1 as opposed to KLCP2; and (iii) to complex preferentially, as described herein, to an HCP2, as opposed to another molecule of HCP1. HCP1, together with its LLCP1, provide specificity for a first epitope (while KLCP2, together with its HCP2, provide specificity for a second epitope).

[0240] “Heavy chain polypeptide 2 (HCP2)”, as that term is used herein, refers to a polypeptide comprising sufficient heavy chain (HC) sequence, e.g., HC variable region sequence, such that when combined with a cognate LLCP1, can mediate specific binding to its epitope and complex with an HCP1. In an embodiment, it comprises all or a fragment of a CH1region. In an embodiment, it comprises all or a fragment of a CH2 and/or CH3 region. In an embodiment an HCP1 comprises HC-CDR1, HC-CDR2, HC-CDR3, FR1, FR2, FR3, FR4, CH1, CH2, and CH3, or sufficient sequence therefrom to: (i) mediate specific binding of its epitope and complex with an KLCP2, (ii) to complex preferentially, as described herein to KLCP2 as opposed to LLCP1; and (iii) to complex preferentially, as described herein, to an HCP1, as opposed to another molecule of HCP2. HCP2, together with its KLCP2, provide specificity for a second epitope (while LLCP1, together with its HCP1, provide specificity for a first epitope).

[0241] In some embodiments of the multispecific antibody molecule disclosed herein:

LLCP1 has a higher affinity for HCP1 than for HCP2; and/or
KLCP2 has a higher affinity for HCP2 than for HCP1.

[0242] In embodiments, the affinity of LLCP1 for HCP1 is sufficiently greater than its affinity for HCP2, such that under preselected conditions, e.g., in aqueous buffer, e.g., at pH 7, in saline, e.g., at pH 7, or under physiological conditions, at least 75, 80, 90, 95, 98, 99, 99.5, or 99.9% of the multispecific antibody molecule molecules have a LLCP1 complexed, or interfaced with, a HCP1.

[0243] In some embodiments of the multispecific antibody molecule disclosed herein: the HCP1 has a greater affinity for HCP2, than for a second molecule of HCP1; and/or the HCP2 has a greater affinity for HCP1, than for a second molecule of HCP2.

[0244] In embodiments, the affinity of HCP1 for HCP2 is sufficiently greater than its affinity for a second molecule of HCP1, such that under preselected conditions, e.g., in aqueous buffer, e.g., at pH 7, in saline, e.g., at pH 7, or under physiological conditions, at least 75%, 80, 90, 95, 98, 99 99.5 or 99.9% of the multispecific antibody molecule molecules have a HCP1 complexed, or interfaced with, a HCP2.

[0245] In another aspect, disclosed herein is a method for making, or producing, a multispecific antibody molecule. The method includes:
[0246] (i) providing a first heavy chain polypeptide (e.g., a heavy chain polypeptide comprising one, two, three or all of a first heavy chain variable region (first VH), a first CH1, a first heavy chain constant region (e.g., a first CH2, a first CH3, or both));
[0247] (ii) providing a second heavy chain polypeptide (e.g., a heavy chain polypeptide comprising one, two, three or all of a second heavy chain variable region (second VH), a second CH1, a second heavy chain constant region (e.g., a second CH2, a second CH3, or both));
[0248] (iii) providing a lambda chain polypeptide (e.g., a lambda light variable region (VLλ), a lambda light constant chain (VLλ), or both) that preferentially associates with the first heavy chain polypeptide (e.g., the first VH); and
[0249] (iv) providing a kappa chain polypeptide (e.g., a lambda light variable region (VLκ), a lambda light constant chain (VLκ), or both) that preferentially associates with the second heavy chain polypeptide (e.g., the second VH), under conditions where (i)-(iv) associate.

[0250] In embodiments, the first and second heavy chain polypeptides form an Fc interface that enhances heterodimerization.

[0251] In embodiments, (i)-(iv) (e.g., nucleic acid encoding (i)-(iv)) are introduced in a single cell, e.g., a single mammalian cell, e.g., a CHO cell. In embodiments, (i)-(iv) are expressed in the cell.

[0252] In embodiments, (i)-(iv) (e.g., nucleic acid encoding (i)-(iv)) are introduced in different cells, e.g., different mammalian cells, e.g., two or more CHO cell. In embodiments, (i)-(iv) are expressed in the cells.

[0253] In one embodiment, the method further comprises purifying a cell-expressed antibody molecule, e.g., using a lambda- and/or-kappa-specific purification, e.g., affinity chromatography.

[0254] In embodiments, the method further comprises evaluating the cell-expressed multispecific antibody molecule. For example, the purified cell-expressed multispecific antibody molecule can be analyzed by techniques known in the art, include mass spectrometry. In one embodiment, the purified cell-expressed antibody molecule is cleaved, e.g., digested with papain to yield the Fab moieties and evaluated using mass spectrometry.

[0255] In embodiments, the method produces correctly paired kappa/lambda multispecific, e.g., bispecific, antibody molecules in a high yield, e.g., at least 75%, 80, 90, 95, 98, 99 99.5 or 99.9%.

[0256] In other embodiments, the multispecific, e.g., a bispecific, antibody molecule that includes:
[0257] (i) a first heavy chain polypeptide (HCP1) (e.g., a heavy chain polypeptide comprising one, two, three or all of a first heavy chain variable region (first VH), a first CH1, a first heavy chain constant region (e.g., a first CH2, a first CH3, or both)), e.g., wherein the HCP1 binds to a first epitope;
[0258] (ii) a second heavy chain polypeptide (HCP2) (e.g., a heavy chain polypeptide comprising one, two, three or all of a second heavy chain variable region (second VH), a second CH1, a second heavy chain constant region (e.g., a second CH2, a second CH3, or both)), e.g., wherein the HCP2 binds to a second epitope;
[0259] (iii) a lambda light chain polypeptide (LLCP1) (e.g., a lambda light variable region (VLl), a lambda light constant chain (VLl), or both) that preferentially associates with the first heavy chain polypeptide (e.g., the first VH), e.g., wherein the LLCP1 binds to a first epitope; and
[0260] (iv) a kappa light chain polypeptide (KLCP2) (e.g., a lambda light variable region (VLk), a lambda light constant chain (VLk), or both) that preferentially associates with the second heavy chain polypeptide (e.g., the second VH), e.g., wherein the KLCP2 binds to a second epitope.

[0261] In embodiments, the first and second heavy chain polypeptides form an Fc interface that enhances heterodimerization. In embodiments, the multispecific antibody molecule has a first binding specificity that includes a hybrid VLl-CLl heterodimerized to a first heavy chain variable region connected to the Fc constant, CH2-CH3 domain (having a knob modification) and a second binding specificity that includes a hybrid VLk-CLk heterodimerized to a second heavy chain variable region connected to the Fc constant, CH2-CH3 domain (having a hole modification).

### TRBC1 and TRBC2 Antigen Binding Domains

[0262] The present disclosure provides, inter alia, antibody molecules, e.g., multispecific (e.g., bi-, tri-, tetra-specific) or multifunctional molecules, that include, e.g., are engineered to contain, one or more antigen binding domains that bind to a tumor antigen on a lymphoma cell (e.g., T cell). In some embodiments, the tumor antigen comprises a T cell receptor comprising TRBC1 or TRBC2. In some embodiments, the antigen binding domain preferentially binds to a T cell receptor comprising TRBC1 (e.g., relative to a T cell receptor comprising TRBC2). In some embodiments, the antigen binding domain preferentially binds to a T cell receptor comprising TRBC2 (e.g., relative to a T cell receptor comprising TRBC1). In some embodiments, the multifunctional molecules include, e.g., are engineered to contain, one or more antigen binding domains that selectively target lymphocytes expressing TRBC1 or TRBC2. In some embodiments, the antigen binding domain selectively targets lymphocytes expressing a T cell receptor comprising TRBC1 or a T cell receptor comprising TRBC2.

[0263] T cell receptors (TCRs) are receptors found on the surface of lymphocytes, specifically on T lymphocytes (T cells). TCRs are responsible for recognizing antigen fragments presented by major histocompatibility complex (MHC) molecules on other immune cells (e.g., B cells) by signaling through associated CD3 and activating the T cell. The vast majority of TCRs in humans are heterodimers comprising an alpha chain and a beta chain. Both alpha and beta chains of TCR comprise variable and constant regions. The variable regions of the alpha and beta chain are encoded by distinct DNA elements (V, D, and J elements for beta chain; V and J elements for the alpha chain). Recombination between these elements produces in large part the variation in antigen binding specificity of TCRs. The TCR beta chain constant region is selected from two different domains, beta constant domain 1 and beta constant domain 2. Without wishing to be bound by theory, it is thought that the majority of TCRs comprising a beta chain comprise a beta chain comprising beta constant domain 1 or beta constant domain 2, but not both constant domain 1 and constant domain 2.

[0264] In some embodiments, the multifunctional or multispecific molecules or antibody molecules of the present application comprise an antigen binding domain that binds to a tumor antigen on a lymphoma cell (e.g., a T cell), e.g., a T cell receptor comprising TRBC1, TRBC1, a T cell receptor comprising TRBC2, or TRBC2. In some embodiments, the multifunctional or multispecific molecules or antibody molecules of the present application comprise an antigen binding domain that selectively targets lymphocytes expressing a T cell receptor comprising TRBC1, TRBC1, a T cell receptor comprising TRBC2, or TRBC2. While it is most typical for a lymphocyte or lymphoma cell presenting a T cell receptor comprising TRBC1 or TRBC2 to be a T cell, cancer causes many disruptions in non-disease expression patterns. Thus, in some embodiments, the lymphoma cell or lymphocyte may not be a T cell. In some embodiments, the lymphoma cell or lymphocyte is a B cell. In some embodiments, the lymphoma cell or lymphocyte is a natural killer cell.

[0265] In some embodiments, the antigen binding domain (e.g., first antigen binding domain) comprises any CDR amino acid sequence, framework region (FWR) amino acid sequence, or variable region amino acid sequence of an anti-TRBC1 antibody known in the art. In some embodiments, CDR amino acid sequence, framework region (FWR) amino acid sequence, or variable region amino acid sequence are selected from JOVI.1.

### TRBC1 Antigen Binding Domains

[0266] In some embodiments, the antigen binding domain that binds to TRBC1 comprises one or more CDRs (e.g., VHCDR1, VHCDR2, VHCDR3, VLCDR1, VLCDR2, and/or VLCDR3) disclosed in Table 2, Table 6, or Table 3, or a sequence having at least 85%, 90%, 95%, or 99% identity thereto. In some embodiments, the antigen binding domain that binds to TRBC1 comprises one or more framework regions (e.g., VHFWR1, VHFWR2, VHFWR3, VHFWR4, VLFWR1, VLFWR2, VLFWR3, and/or VLFWR4) disclosed in Table 2, Table 6, or Table 3, or a sequence having at least 85%, 90%, 95%, or 99% identity thereto. In some embodiments, the antigen binding domain that binds to TRBC1 comprises a VH and/or a VL disclosed in Table 4, or a sequence having at least 85%, 90%, 95%, or 99% identity thereto. In some embodiments, the antigen binding domain that binds to TRBC1 comprises an amino acid sequence disclosed in Table 5, or a sequence having at least 85%, 90%, 95%, or 99% identity thereto.

[0267] In some embodiments, the antigen binding domain that binds to TRBC1 comprises one or more CDRs (e.g., VHCDR1, VHCDR2, VHCDR3, VLCDR1, VLCDR2, and/or VLCDR3) disclosed in Table 3A and/or 3B, or a sequence having at least 85%, 90%, 95%, or 99% identity thereto. In some embodiments, the antigen binding domain that binds to TRBC1 comprises one or more framework regions (e.g., VHFWR1, VHFWR2, VHFWR3, VHFWR4, VLFWR1, VLFWR2, VLFWR3, and/or VLFWR4) disclosed in Table 3A and/or 3B, or a sequence having at least 85%, 90%, 95%, or 99% identity thereto. In some embodiments, the antigen binding domain that binds to TRBC1 comprises a VH and/or a VL disclosed in Table 4, or a sequence having at least 85%, 90%, 95%, or 99% identity thereto.

[0268] In some embodiments, the antigen binding domain that binds to TRBC1 comprises a VH comprising a heavy chain complementarity determining region 1 (VHCDR1), a VHCDR2, and a VHCDR3, and a VL comprising a light chain complementarity determining region 1 (VLCDR1), a VLCDR2, and a VLCDR3.

[0269] In some embodiments, the VHCDR1, VHCDR2, and VHCDR3 comprise the amino acid sequences of SEQ ID NOs: 7346, 7355, and 202, respectively (or a sequence having at least 85%, 90%, 95%, or 99% identity thereto). In some embodiments, the VHCDR1, VHCDR2, and VHCDR3 comprise the amino acid sequences of SEQ ID NOs: 7346, 201, and 202, respectively (or a sequence having at least 85%, 90%, 95%, or 99% identity thereto). In some embodiments, the VHCDR1, VHCDR2, and VHCDR3 comprise the amino acid sequences of SEQ ID NOs: 7354, 201, and 202, respectively (or a sequence having at least 85%, 90%, 95%, or 99% identity thereto). In some embodiments, the VHCDR1, VHCDR2, and VHCDR3 comprise the amino acid sequences of SEQ ID NOs: 7354, 7355, and 202, respectively (or a sequence having at least 85%, 90%, 95%, or 99% identity thereto).

[0270] In some embodiments, the VLCDR1, VLCDR2, and VLCDR3 comprise the amino acid sequences of SEQ ID NOs: 223, 224, and 225, respectively (or a sequence having at least 85%, 90%, 95%, or 99% identity thereto). In some embodiments, the VLCDR1, VLCDR2, and VLCDR3 comprise the amino acid sequences of SEQ ID NOs: 7367, 224, and 225, respectively (or a sequence having at least 85%, 90%, 95%, or 99% identity thereto). In some embodiments, the VLCDR1, VLCDR2, and VLCDR3 comprise the amino acid sequences of SEQ ID NOs: 223, 7368, and 225, respectively (or a sequence having at least 85%, 90%, 95%, or 99% identity thereto). In some embodiments, the VLCDR1, VLCDR2, and VLCDR3 comprise the amino acid sequences of SEQ ID NOs: 223, 224, and 7369, respectively (or a sequence having at least 85%, 90%, 95%, or 99% identity thereto). In some embodiments, the VLCDR1, VLCDR2, and VLCDR3 comprise the amino acid sequences of SEQ ID NOs: 7367, 7368, and 7369, respectively (or a sequence having at least 85%, 90%, 95%, or 99% identity thereto).

[0271] In some embodiments, the VHCDR1, VHCDR2, VHCDR3, VLCDR1, VLCDR2, and VLCDR3 comprise the amino acid sequences of SEQ ID NOs: 7346, 7355, 202, 223, 224, and 225, respectively (or a sequence having at least 85%, 90%, 95%, or 99% identity thereto). In some embodiments, the VHCDR1, VHCDR2, VHCDR3, VLCDR1, VLCDR2, and VLCDR3 comprise the amino acid sequences of SEQ ID NOs: 7346, 201, 202, 223, 224, and 225, respectively (or a sequence having at least 85%, 90%, 95%, or 99% identity thereto). In some embodiments, the VHCDR1, VHCDR2, VHCDR3, VLCDR1, VLCDR2, and VLCDR3 comprise the amino acid sequences of: SEQ ID NOs: 7346, 7355, 202, 7367, 224, and 225, respectively (or a sequence having at least 85%, 90%, 95%, or 99% identity thereto); SEQ ID NOs: 7346, 7355, 202, 223, 7368, and 225, respectively (or a sequence having at least 85%, 90%, 95%, or 99% identity thereto); SEQ ID NOs: 7346, 7355, 202, 223, 224, and 7369, respectively (or a sequence having at least 85%, 90%, 95%, or 99% identity thereto); SEQ ID NOs: 7346, 7355, 202, 7367, 7368, and 7369, respectively (or a sequence having at least 85%, 90%, 95%, or 99% identity thereto); SEQ ID NOs: 7346, 201, 202, 7367, 224, and 225, respectively (or a sequence having at least 85%, 90%, 95%, or 99% identity thereto); SEQ ID NOs: 7346, 201, 202, 223, 7368, and 225, respectively (or a sequence having at least 85%, 90%, 95%, or 99% identity thereto); SEQ ID NOs: 7346, 201, 202, 223, 224, and 7369, respectively (or a sequence having at least 85%, 90%, 95%, or 99% identity thereto); SEQ ID NOs: 7346, 201, 202, 7367, 7368, and 7369, respectively (or a sequence having at least 85%, 90%, 95%, or 99% identity thereto); SEQ ID NOs: 7354, 201, 202, 223, 224, and 225, respectively (or a sequence having at least 85%, 90%, 95%, or 99% identity thereto); SEQ ID NOs: 7354, 201, 202, 7367, 224, and 225, respectively (or a sequence having at least 85%, 90%, 95%, or 99% identity thereto); SEQ ID NOs: 7354, 201, 202, 223, 7368, and 225, respectively (or a sequence having at least 85%, 90%, 95%, or 99% identity thereto); SEQ ID NOs: 7354, 201, 202, 223, 224, and 7369, respectively (or a sequence having at least 85%, 90%, 95%, or 99% identity thereto); SEQ ID NOs: 7354, 201, 202, 7367, 7368, and 7369, respectively (or a sequence having at least 85%, 90%, 95%, or 99% identity thereto); SEQ ID NOs: 7354, 7355, 202, 223, 224, and 225, respectively (or a sequence having at least 85%, 90%, 95%, or 99% identity thereto); SEQ ID NOs: 7354, 7355, 202, 7367, 224, and 225, respectively (or a sequence having at least 85%, 90%, 95%, or 99% identity thereto); SEQ ID NOs: 7354, 7355, 202, 223, 7368, and 225, respectively (or a sequence having at least 85%, 90%, 95%, or 99% identity thereto); SEQ ID NOs: 7354, 7355, 202, 223, 224, and 7369, respectively (or a sequence having at least 85%, 90%, 95%, or 99% identity thereto); or SEQ ID NOs: 7354, 7355, 202, 7367, 7368, and 7369, respectively (or a sequence having at least 85%, 90%, 95%, or 99% identity thereto).

[0272] In some embodiments, the VH comprises an amino acid sequence selected from the group consisting of SEQ ID NOs: 7351, 253, 250-252, 254, 7343, 7344, 7350, and 7352 (or a sequence having at least 85%, 90%, 95%, or 99% identity thereto) and/or the VL comprises an amino acid sequence selected from the group consisting of SEQ ID NOs: 258, 255-257, 259, 260, and 7357-7360 (or a sequence having at least 85%, 90%, 95%, or 99% identity thereto). In some embodiments, the VH and VL comprise the amino acid sequences of SEQ ID NOs: 7351 and 258, respectively (or a sequence having at least 85%, 90%, 95%, or 99% identity thereto). In some embodiments, the VH and VL comprise the amino acid sequences of SEQ ID NOs: 253 and 258, respectively (or a sequence having at least 85%, 90%, 95%, or 99% identity thereto).

[0273] In some embodiments, the antigen binding domain (e.g., first antigen binding domain) that binds to a tumor antigen on a lymphoma cell (e.g., a T cell), e.g., a T cell receptor comprising TRBC1, TRBC1, a T cell receptor comprising TRBC2, or TRBC2 comprises any CDR amino acid sequence, framework region (FWR) amino acid sequence, or variable region amino acid sequence Tables 2, 3, 3A, 3B, 4, 5, or 6. In some embodiments, the antigen binding domain (e.g., first antigen binding domain) that binds to a tumor antigen on a lymphoma cell (e.g., a T cell), e.g., a T cell receptor comprising TRBC1, TRBC1, a T cell receptor comprising TRBC2, or TRBC2 comprises heavy and/or light chain amino acid sequences of Table 5. In some embodiments, the antigen binding domain (e.g., first antigen binding domain) that selectively targets lymphocytes expressing a T cell receptor comprising TRBC1, TRBC1, a T cell receptor comprising TRBC2, or TRBC2 comprises any CDR amino acid sequence, framework region (FWR) amino acid sequence, or variable region amino acid sequence disclosed in Tables 2, 3, 3A, 3B, 4, 5, or 6. In some embodiments, the antigen binding domain (e.g., first antigen binding domain) that selectively targets lymphocytes expressing a T cell receptor comprising TRBC1, TRBC1, a T cell receptor comprising TRBC2, or TRBC2 comprises heavy and/or light chain amino acid sequences of Table 5. An antigen binding domain that binds to a tumor antigen comprising TRBC1 or selectively targets lymphocytes expressing TRBC1 may be said to target TRBC1 (i.e., a TRBC1-targeting antigen binding domain). An antigen binding domain that binds to a tumor antigen comprising TRBC2 or selectively targets lymphocytes expressing TRBC2 may be said to target TRBC2 (i.e., a TRBC2-targeting antigen binding domain).

[0274] In some embodiments, the antigen binding domain that targets TRBC1 comprises a VH comprising a heavy chain complementarity determining region 1 (VHCDR1) amino acid sequence of SEQ ID NO: 200 (or a sequence with no more than 1, 2, 3, or 4 mutations, e.g., substitutions, additions, or deletions), a VHCDR2 amino acid sequence of SEQ ID NO: 201 (or a sequence with no more than 1, 2, 3, or 4 mutations, e.g., substitutions, additions, or deletions), and/or a VHCDR3 amino acid sequence of SEQ ID NO: 202 (or a sequence with no more than 1, 2, 3, or 4 mutations, e.g., substitutions, additions, or deletions). In some embodiments, the TRBC1 antigen binding domain comprises a VH comprising a VHCDR1 amino acid sequence of SEQ ID NO: 200, a VHCDR2 amino acid sequence of SEQ ID NO: 201, and/or a VHCDR3 amino acid sequence of SEQ ID NO: 202.

[0275] In some embodiments, the antigen binding domain that targets TRBC1 comprises a VL comprising a light chain complementarity determining region 1 (VLCDR1) amino acid sequence of SEQ ID NO: 223 (or a sequence with no more than 1, 2, 3, or 4 mutations, e.g., substitutions, additions, or deletions), a VLCDR2 amino acid sequence of SEQ ID NO: 224 (or a sequence with no more than 1, 2, 3, or 4 mutations, e.g., substitutions, additions, or deletions), and/or a VLCDR3 amino acid sequence of SEQ ID NO: 225 (or a sequence with no more than 1, 2, 3, or 4 mutations, e.g., substitutions, additions, or deletions). In some embodiments, the antigen binding domain that targets TRBC1 comprises a VL comprising a VLCDR1 amino acid sequence of SEQ ID NO: 223, a VLCDR2 amino acid sequence of SEQ ID NO: 224, and a VLCDR3 amino acid sequence of SEQ ID NO: 225.

[0276] In some embodiments, the antigen binding domain that targets TRBC1 comprises a VH comprising a heavy chain framework region 1 (VHFWR1) amino acid sequence of SEQ ID NO: 203, a VHFWR2 amino acid sequence of SEQ ID NO: 204, a VHFWR3 amino acid sequence of SEQ ID NO: 205, and/or a VHFWR4 amino acid sequence of SEQ ID NO: 206.

[0277] In some embodiments, the antigen binding domain that targets TRBC1 comprises a VL comprising a light chain framework region 1 (VLFWR1) amino acid sequence of SEQ ID NO: 226, a VLFWR2 amino acid sequence of SEQ ID NO: 227, a VLFWR3 amino acid sequence of SEQ ID NO: 228, and/or a VLFWR4 amino acid sequence of SEQ ID NO: 229.

[0278] In some embodiments, the antigen binding domain that targets TRBC1 comprises a VH comprising a VHFWR1 amino acid sequence of SEQ ID NO: 203 (or a sequence with no more than 1, 2, 3, 4, 5, or 6 mutations, e.g., substitutions, additions, or deletions, therefrom), a VHFWR2 amino acid sequence of SEQ ID NO: 204 (or a sequence with no more than 1, 2, 3, 4, 5, or 6 mutations, e.g., substitutions, additions, or deletions, therefrom), a VHFWR3 amino acid sequence of SEQ ID NO: 205 (or a sequence with no more than 1, 2, 3, 4, 5, 6, 7, 8, 9, 10, or 11 mutations, e.g., substitutions, additions, or deletions), and/or a VHFWR4 amino acid sequence of SEQ ID NO: 206.

[0279] In some embodiments, the antigen binding domain that targets TRBC1 comprises a VL comprising a VLFWR1 amino acid sequence of SEQ ID NO: 226 (or a sequence with no more than 1, 2, or 3 mutations, e.g., substitutions, additions, or deletions), a VLFWR2 amino acid sequence of SEQ ID NO: 227 (or a sequence with no more than 1 mutation, e.g., substitution, addition, or deletion), a VLFWR3 amino acid sequence of SEQ ID NO: 228 (or a sequence with no more than 1 mutation, e.g., substitution, addition, or deletion), and/or a VLFWR4 amino acid sequence of SEQ ID NO: 229.

[0280] In some embodiments, the antigen binding domain that targets TRBC1 comprises a VH comprising a heavy chain framework region 1 (VHFWR1) amino acid sequence of SEQ ID NO: 207, a VHFWR2 amino acid sequence of SEQ ID NO: 208, a VHFWR3 amino acid sequence of SEQ ID NO: 209, and/or a VHFWR4 amino acid sequence of SEQ ID NO: 210.

[0281] In some embodiments, the antigen binding domain that targets TRBC1 comprises a VH comprising a VHFWR1 amino acid sequence of SEQ ID NO: 207 (or a sequence with no more than 1, 2, 3, 4, 5, or 6 mutations, e.g., substitutions, additions, or deletions, therefrom), a VHFWR2 amino acid sequence of SEQ ID NO: 208 (or a sequence with no more than 1, 2, 3, 4, 5, or 6 mutations, e.g., substitutions, additions, or deletions, therefrom), a VHFWR3 amino acid sequence of SEQ ID NO: 209 (or a sequence with no more than 1, 2, 3, 4, 5, 6, 7, 8, 9, 10, or 11 mutations, e.g., substitutions, additions, or deletions), and/or a VHFWR4 amino acid sequence of SEQ ID NO: 210.

[0282] In some embodiments, the antigen binding domain that targets TRBC1 comprises a VH comprising a heavy chain framework region 1 (VHFWR1) amino acid sequence of SEQ ID NO: 211, a VHFWR2 amino acid sequence of SEQ ID NO: 212, a VHFWR3 amino acid sequence of SEQ ID NO: 213, and/or a VHFWR4 amino acid sequence of SEQ ID NO: 214.

[0283] In some embodiments, the antigen binding domain that targets TRBC1 comprises a VH comprising a VHFWR1 amino acid sequence of SEQ ID NO: 211 (or a sequence with no more than 1, 2, 3, 4, 5, or 6 mutations, e.g., substitutions, additions, or deletions, therefrom), a VHFWR2 amino acid sequence of SEQ ID NO: 212 (or a sequence with no more than 1, 2, 3, 4, 5, or 6 mutations, e.g., substitutions, additions, or deletions, therefrom), a VHFWR3 amino acid sequence of SEQ ID NO: 213 (or a sequence with no more than 1, 2, 3, 4, 5, 6, 7, 8, 9, 10, or 11 mutations, e.g., substitutions, additions, or deletions), and/or a VHFWR4 amino acid sequence of SEQ ID NO: 214.

[0284] In some embodiments, the antigen binding domain that targets TRBC1 comprises a VH comprising a heavy chain framework region 1 (VHFWR1) amino acid sequence of SEQ ID NO: 215, a VHFWR2 amino acid sequence of SEQ ID NO: 216, a VHFWR3 amino acid sequence of SEQ ID NO: 217, and/or a VHFWR4 amino acid sequence of SEQ ID NO: 218.

[0285] In some embodiments, the antigen binding domain that targets TRBC1 comprises a VH comprising a VHFWR1 amino acid sequence of SEQ ID NO: 215 (or a sequence with no more than 1, 2, 3, 4, 5, or 6 mutations, e.g., substitutions, additions, or deletions, therefrom), a VHFWR2 amino acid sequence of SEQ ID NO: 216 (or a sequence with no more than 1, 2, 3, 4, 5, or 6 mutations, e.g., substitutions, additions, or deletions, therefrom), a VHFWR3 amino acid sequence of SEQ ID NO: 217 (or a sequence with no more than 1, 2, 3, 4, 5, 6, 7, 8, 9, 10, or 11 mutations, e.g., substitutions, additions, or deletions), and/or a VHFWR4 amino acid sequence of SEQ ID NO: 218.

[0286] In some embodiments, the antigen binding domain that targets TRBC1 comprises a VH comprising a heavy chain framework region 1 (VHFWR1) amino acid sequence of SEQ ID NO: 219, a VHFWR2 amino acid sequence of SEQ ID NO: 220, a VHFWR3 amino acid sequence of SEQ ID NO: 221, and/or a VHFWR4 amino acid sequence of SEQ ID NO: 222.

[0287] In some embodiments, the antigen binding domain that targets TRBC1 comprises a VH comprising a VHFWR1 amino acid sequence of SEQ ID NO: 219 (or a sequence with no more than 1, 2, 3, 4, 5, or 6 mutations, e.g., substitutions, additions, or deletions, therefrom), a VHFWR2 amino acid sequence of SEQ ID NO: 220 (or a sequence with no more than 1, 2, 3, 4, 5, or 6 mutations, e.g., substitutions, additions, or deletions, therefrom), a VHFWR3 amino acid sequence of SEQ ID NO: 221 (or a sequence with no more than 1, 2, 3, 4, 5, 6, 7, 8, 9, 10, or 11 mutations, e.g., substitutions, additions, or deletions), and/or a VHFWR4 amino acid sequence of SEQ ID NO: 222.

[0288] In some embodiments, the antigen binding domain that targets TRBC1 comprises a VL comprising a light chain framework region 1 (VLFWR1) amino acid sequence of SEQ ID NO: 230, a VLFWR2 amino acid sequence of SEQ ID NO: 231, a VLFWR3 amino acid sequence of SEQ ID NO: 232, and/or a VLFWR4 amino acid sequence of SEQ ID NO: 233.

[0289] In some embodiments, the antigen binding domain that targets TRBC1 comprises a VL comprising a VLFWR1 amino acid sequence of SEQ ID NO: 230 (or a sequence with no more than 1, 2, or 3 mutations, e.g., substitutions, additions, or deletions), a VLFWR2 amino acid sequence of SEQ ID NO: 231 (or a sequence with no more than 1 mutation, e.g., substitution, addition, or deletion), a VLFWR3 amino acid sequence of SEQ ID NO: 232 (or a sequence with no more than 1 mutation, e.g., substitution, addition, or deletion), and/or a VLFWR4 amino acid sequence of SEQ ID NO: 233.

[0290] In some embodiments, the antigen binding domain that targets TRBC1 comprises a VL comprising a light chain framework region 1 (VLFWR1) amino acid sequence of SEQ ID NO: 234, a VLFWR2 amino acid sequence of SEQ ID NO: 235, a VLFWR3 amino acid sequence of SEQ ID NO: 236, and/or a VLFWR4 amino acid sequence of SEQ ID NO: 237.

[0291] In some embodiments, the antigen binding domain that targets TRBC1 comprises a VL comprising a VLFWR1 amino acid sequence of SEQ ID NO: 234 (or a sequence with no more than 1, 2, or 3 mutations, e.g., substitutions, additions, or deletions), a VLFWR2 amino acid sequence of SEQ ID NO: 235 (or a sequence with no more than 1 mutation, e.g., substitution, addition, or deletion), a VLFWR3 amino acid sequence of SEQ ID NO: 236 (or a sequence with no more than 1 mutation, e.g., substitution, addition, or deletion), and/or a VLFWR4 amino acid sequence of SEQ ID NO: 237.

[0292] In some embodiments, the antigen binding domain that targets TRBC1 comprises a VL comprising a light chain framework region 1 (VLFWR1) amino acid sequence of SEQ ID NO: 238, a VLFWR2 amino acid sequence of SEQ ID NO: 239, a VLFWR3 amino acid sequence of SEQ ID NO: 240, and/or a VLFWR4 amino acid sequence of SEQ ID NO: 241.

[0293] In some embodiments, the antigen binding domain that targets TRBC1 comprises a VL comprising a VLFWR1 amino acid sequence of SEQ ID NO: 238 (or a sequence with no more than 1, 2, or 3 mutations, e.g., substitutions, additions, or deletions), a VLFWR2 amino acid sequence of SEQ ID NO: 239 (or a sequence with no more than 1 mutation, e.g., substitution, addition, or deletion), a VLFWR3 amino acid sequence of SEQ ID NO: 240 (or a sequence with no more than 1 mutation, e.g., substitution, addition, or deletion), and/or a VLFWR4 amino acid sequence of SEQ ID NO: 241.

[0294] In some embodiments, the antigen binding domain that targets TRBC1 comprises a VL comprising a light chain framework region 1 (VLFWR1) amino acid sequence of SEQ ID NO: 242, a VLFWR2 amino acid sequence of SEQ ID NO: 243, a VLFWR3 amino acid sequence of SEQ ID NO: 244, and/or a VLFWR4 amino acid sequence of SEQ ID NO: 245.

[0295] In some embodiments, the antigen binding domain that targets TRBC1 comprises a VL comprising a VLFWR1 amino acid sequence of SEQ ID NO: 242 (or a sequence with no more than 1, 2, or 3 mutations, e.g., substitutions, additions, or deletions), a VLFWR2 amino acid sequence of SEQ ID NO: 243 (or a sequence with no more than 1 mutation, e.g., substitution, addition, or deletion), a VLFWR3 amino acid sequence of SEQ ID NO: 244 (or a sequence with no more than 1 mutation, e.g., substitution, addition, or deletion), and/or a VLFWR4 amino acid sequence of SEQ ID NO: 245.

[0296] In some embodiments, the antigen binding domain that targets TRBC1 comprises a VL comprising a light chain framework region 1 (VLFWR1) amino acid sequence of SEQ ID NO: 246, a VLFWR2 amino acid sequence of SEQ ID NO: 247, a VLFWR3 amino acid sequence of SEQ ID NO: 248, and/or a VLFWR4 amino acid sequence of SEQ ID NO: 249.

[0297] In some embodiments, the antigen binding domain that targets TRBC1 comprises a VL comprising a VLFWR1 amino acid sequence of SEQ ID NO: 246 (or a sequence with no more than 1, 2, or 3 mutations, e.g., substitutions, additions, or deletions), a VLFWR2 amino acid sequence of SEQ ID NO: 247 (or a sequence with no more than 1 mutation, e.g., substitution, addition, or deletion), a VLFWR3 amino acid sequence of SEQ ID NO: 248 (or a sequence with no more than 1 mutation, e.g., substitution, addition, or deletion), and/or a VLFWR4 amino acid sequence of SEQ ID NO: 249.

[0298] In some embodiments, the antigen binding domain that targets TRBC1 comprises a VH comprising the amino acid sequence of SEQ ID NO: 250 (or an amino acid sequence having at least about 77%, 80%, 85%, 90%, 95%, or 99% sequence identity to SEQ ID NO: 250). In some embodiments, the antigen binding domain that targets TRBC1 comprises a VL comprising the amino acid sequence of SEQ ID NO: 255 (or an amino acid sequence having at least about 93%, 95%, or 99% sequence identity to SEQ ID NO: 255). In some embodiments, antigen binding domain that targets TRBC1 comprises a VH comprising the amino acid sequence of SEQ ID NO: 250. In some embodiments, the antigen binding domain that targets TRBC1 comprises a VL comprising the amino acid sequence of SEQ ID NO: 255.

[0299] In some embodiments, the antigen binding domain that targets TRBC1 comprises a VH comprising the amino acid sequence of SEQ ID NO: 250, and a VL comprising the amino acid sequence of SEQ ID NO: 255.

[0300] In some embodiments, the antigen binding domain that targets TRBC1 comprises a VH comprising the amino acid sequence of SEQ ID NO: 251 (or an amino acid sequence having at least about 77%, 80%, 85%, 90%, 95%, or 99% sequence identity to SEQ ID NO: 251). In some embodiments, antigen binding domain that targets TRBC1 comprises a VH comprising the amino acid sequence of SEQ ID NO: 251.

[0301] In some embodiments, the antigen binding domain that targets TRBC1 comprises a VH comprising the amino acid sequence of SEQ ID NO: 252 (or an amino acid sequence having at least about 77%, 80%, 85%, 90%, 95%, or 99% sequence identity to SEQ ID NO: 252). In some embodiments, antigen binding domain that targets TRBC1 comprises a VH comprising the amino acid sequence of SEQ ID NO: 252.

[0302] In some embodiments, the antigen binding domain that targets TRBC1 comprises a VH comprising the amino acid sequence of SEQ ID NO: 253 (or an amino acid sequence having at least about 77%, 80%, 85%, 90%, 95%, or 99% sequence identity to SEQ ID NO: 253). In some embodiments, antigen binding domain that targets TRBC1 comprises a VH comprising the amino acid sequence of SEQ ID NO: 253.

[0303] In some embodiments, the antigen binding domain that targets TRBC1 comprises a VH comprising the amino acid sequence of SEQ ID NO: 254 (or an amino acid sequence having at least about 77%, 80%, 85%, 90%, 95%, or 99% sequence identity to SEQ ID NO: 254). In some embodiments, antigen binding domain that targets TRBC1 comprises a VH comprising the amino acid sequence of SEQ ID NO: 254.

[0304] In some embodiments, the antigen binding domain that targets TRBC1 comprises a VL comprising the amino acid sequence of SEQ ID NO: 256 (or an amino acid sequence having at least about 93%, 95%, or 99% sequence identity to SEQ ID NO: 256). In some embodiments, the antigen binding domain that targets TRBC1 comprises a VL comprising the amino acid sequence of SEQ ID NO: 256.

[0305] In some embodiments, the antigen binding domain that targets TRBC1 comprises a VL comprising the amino acid sequence of SEQ ID NO: 257 (or an amino acid sequence having at least about 93%, 95%, or 99% sequence identity to SEQ ID NO: 257). In some embodiments, the antigen binding domain that targets TRBC1 comprises a VL comprising the amino acid sequence of SEQ ID NO: 257.

[0306] In some embodiments, the antigen binding domain that targets TRBC1 comprises a VL comprising the amino acid sequence of SEQ ID NO: 258 (or an amino acid sequence having at least about 93%, 95%, or 99% sequence identity to SEQ ID NO: 258). In some embodiments, the antigen binding domain that targets TRBC1 comprises a VL comprising the amino acid sequence of SEQ ID NO: 258.

[0307] In some embodiments, the antigen binding domain that targets TRBC1 comprises a VL comprising the amino acid sequence of SEQ ID NO: 259 (or an amino acid sequence having at least about 93%, 95%, or 99% sequence identity to SEQ ID NO: 259). In some embodiments, the antigen binding domain that targets TRBC1 comprises a VL comprising the amino acid sequence of SEQ ID NO: 259.

[0308] In some embodiments, the antigen binding domain that targets TRBC1 comprises a VL comprising the amino acid sequence of SEQ ID NO: 260 (or an amino acid sequence having at least about 93%, 95%, or 99% sequence identity to SEQ ID NO: 260). In some embodiments, the antigen binding domain that targets TRBC1 comprises a VL comprising the amino acid sequence of SEQ ID NO: 260.

[0309] In some embodiments, the antigen binding domain that targets TRBC1 comprises a heavy chain comprising the amino acid sequence of SEQ ID NO: 6154 (or an amino acid sequence having at least about 93%, 95%, or 99% sequence identity to SEQ ID NO: 6154). In some embodiments, the antigen binding domain that targets TRBC1 comprises a heavy chain comprising the amino acid sequence of SEQ ID NO: 6154.

[0310] In some embodiments, the antigen binding domain that targets TRBC1 comprises a heavy chain comprising the amino acid sequence of SEQ ID NO: 6155 (or an amino acid sequence having at least about 93%, 95%, or 99% sequence identity to SEQ ID NO: 6155). In some embodiments, the antigen binding domain that targets TRBC1 comprises a heavy chain comprising the amino acid sequence of SEQ ID NO: 6155.

[0311] In some embodiments, the antigen binding domain that targets TRBC1 comprises a light chain comprising the amino acid sequence of SEQ ID NO: 6156 (or an amino acid sequence having at least about 93%, 95%, or 99% sequence identity to SEQ ID NO: 6156). In some embodiments, the antigen binding domain that targets TRBC1 comprises a light chain comprising the amino acid sequence of SEQ ID NO: 6156.

[0312] In some embodiments, the antigen binding domain that targets TRBC1 comprises a heavy chain comprising the amino acid sequence of SEQ ID NO: 6167 (or an amino acid sequence having at least about 93%, 95%, or 99% sequence identity to SEQ ID NO: 6167). In some embodiments, the antigen binding domain that targets TRBC1 comprises a heavy chain comprising the amino acid sequence of SEQ ID NO: 6167.

[0313] In some embodiments, the antigen binding domain that targets TRBC1 comprises a heavy chain comprising the amino acid sequence of SEQ ID NO: 6168 (or an amino acid sequence having at least about 93%, 95%, or 99% sequence identity to SEQ ID NO: 6168). In some embodiments, the antigen binding domain that targets TRBC1 comprises a heavy chain comprising the amino acid sequence of SEQ ID NO: 6168.

[0314] In some embodiments, the antigen binding domain that targets TRBC1 comprises a light chain comprising the amino acid sequence of SEQ ID NO: 6169 (or an amino acid sequence having at least about 93%, 95%, or 99% sequence identity to SEQ ID NO: 6169). In some embodiments, the antigen binding domain that targets TRBC1 comprises a light chain comprising the amino acid sequence of SEQ ID NO: 6169.

[0315] In some embodiments, the antigen binding domain that targets TRBC1 comprises a heavy chain comprising the amino acid sequence of SEQ ID NO: 6154 (or an amino acid sequence having at least about 93%, 95%, or 99% sequence identity to SEQ ID NO: 6154) and a light chain comprising the amino acid sequence of SEQ ID NO: 6156 (or an amino acid sequence having at least about 93%, 95%, or 99% sequence identity to SEQ ID NO: 6156). In some embodiments, the antigen binding domain that targets TRBC1 comprises a heavy chain comprising the amino acid sequence of SEQ ID NO: 6154 and a light chain comprising the amino acid sequence of SEQ ID NO: 6156.

[0316] In some embodiments, the antigen binding domain that targets TRBC1 comprises a heavy chain comprising the amino acid sequence of SEQ ID NO: 6155 (or an amino acid sequence having at least about 93%, 95%, or 99% sequence identity to SEQ ID NO: 6155) and a light chain comprising the amino acid sequence of SEQ ID NO: 6156 (or an amino acid sequence having at least about 93%, 95%, or 99% sequence identity to SEQ ID NO: 6156). In some embodiments, the antigen binding domain that targets TRBC1 comprises a heavy chain comprising the amino acid sequence of SEQ ID NO: 6155 and a light chain comprising the amino acid sequence of SEQ ID NO: 6156.

[0317] In some embodiments, the antigen binding domain that targets TRBC1 comprises a heavy chain comprising the amino acid sequence of SEQ ID NO: 6167 (or an amino acid sequence having at least about 93%, 95%, or 99% sequence identity to SEQ ID NO: 6167) and a light chain comprising the amino acid sequence of SEQ ID NO: 6169 (or an amino acid sequence having at least about 93%, 95%, or 99% sequence identity to SEQ ID NO: 6169). In some embodiments, the antigen binding domain that targets TRBC1 comprises a heavy chain comprising the amino acid sequence of SEQ ID NO: 6167 and a light chain comprising the amino acid sequence of SEQ ID NO: 6169.

[0318] In some embodiments, the antigen binding domain that targets TRBC1 comprises a heavy chain comprising the amino acid sequence of SEQ ID NO: 6168 (or an amino acid sequence having at least about 93%, 95%, or 99% sequence identity to SEQ ID NO: 6168) and a light chain comprising the amino acid sequence of SEQ ID NO: 6169 (or an amino acid sequence having at least about 93%, 95% P or 99G sequence identity to SEQ ID NO: 6169). In some embodiments, the antigen binding domain that targets TRBC1 comprises a heavy chain comprising the amino acid sequence of SEQ ID NO: 6168 and a light chain comprising the amino acid sequence of SEQ ID NO: 6169.

TABLE 2
Exemplary heavy chain CDRs and FWRs of TRBC1-targeting antigen binding domains
derived from JOVI.1

| Ab ID | VHFWR1 | VHCDR1 | VHFWR2 | VHCDR2 | VHFWR3 | VHCDR3 | VHFWR4 |
|---|---|---|---|---|---|---|---|
| mJOVI. | EVRLQQ | FTGYVM | WVKQRP | FINPYND | KATLTS | GAGYNF | WGQGTT |
| 1-H | SGPDLIK | H (SEQ | GQGLEW | DIQSNER | DKSSTT | DGAYRF | LTVSS |
| | PGASVK | ID NO: | IG (SEQ | FRG | AYMELS | FDF (SEQ | (SEQ ID |
| | MSCKAS | 200) | ID NO: | (SEQ ID | SLTSEDS | ID NO: | NO: 206) |
| | GYT | | 204) | NO: 201) | AVYYCA | 202) | |
| | (SEQ ID | | | | R (SEQ | | |
| | NO: 203) | | | | ID NO: | | |
| | | | | | 205) | | |
| h1JOVI. | QVQLVQ | FTGYVM | WVRQAP | FINPYND | RVTMTS | GAGYNF | WGQGTL |
| 1- | SGAEVK | H (SEQ | GQGLEW | DIQSNER | DKSTTT | DGAYRF | VTVSS |
| H | KPGASV | ID NO: | MG (SEQ | FRG | AYMELS | FDF (SEQ | (SEQ ID |
| | KVSCKA | 200) | ID NO: | (SEQ ID | SLRSEDT | ID NO: | NO: 210) |
| | SGYT | | 208) | NO: 201) | AVYYCA | 202) | |
| | (SEQ ID | | | | R (SEQ | | |
| | NO: 207) | | | | ID NO: | | |
| | | | | | 209) | | |
| h2JOVI. | QVQLVQ | FTGYVM | WVRQAP | FINPYND | WVTMTS | GAGYNF | WGQGTL |
| 1- | SGAEVK | H (SEQ | GQGLEW | DIQSNER | DKSITTA | DGAYRF | VTVSS |
| H | KPGASV | ID NO: | MG (SEQ | FRG | YMELSR | FDF (SEQ | (SEQ ID |
| | KVSCKA | 200) | ID NO: | (SEQ ID | LRSDDT | ID NO: | NO: 214) |
| | SGYT | | 212 | NO: 201) | AVYYCA | 202) | |
| | (SEQ ID | | | | R (SEQ | | |
| | NO: 211) | | | | ID NO: | | |
| | | | | | 213) | | |
| h3JOVI. | QVQLVQ | FTGYVM | WVRQAP | FINPYND | RVTITSD | GAGYNF | WGQGTL |
| 1- | SGAEVK | H (SEQ | GQGLEW | DIQSNER | KSTTTA | DGAYRF | VTVSS |
| H | KPGSSV | ID NO: | MG (SEQ | FRG | YMELSS | FDF (SEQ | (SEQ ID |
| | KVSCKA | 200) | ID NO: | (SEQ ID | LRSEDT | ID NO: | NO: 218) |
| | SGYT | | 216) | NO: 201) | AVYYCA | 202) | |
| | (SEQ ID | | | | R (SEQ | | |
| | NO: 215) | | | | ID NO: | | |
| | | | | | 217) | | |
| h4JOVI. | QVQLVQ | FTGYVM | WVRQAP | FINPYND | RVTITSD | GAGYNF | WGQGTL |
| 1- | SGAEVK | H (SEQ | GQRLEW | DIQSNER | KSATTA | DGAYRF | VTVSS |
| H | KPGASV | ID NO: | MG (SEQ | FRG | YMELSS | FDF (SEQ | (SEQ ID |
| | KVSCKA | 200) | ID NO: | (SEQ ID | LRSEDT | ID NO: | NO: 222) |
| | SGYT | | 220 | NO: 201) | AVYYCA | 202) | |
| | (SEQ ID | | | | R (SEQ | | |
| | NO: 219) | | | | ID NO: | | |
| | | | | | 221) | | |

TABLE 6
Exemplary heavy chain CDRs and FWRs of TRBC1-targeting antigen binding domains
derived from JOVI.1 (according to the Kabat numbering scheme)

| Ab ID | VHFWR1 | VHCDR1 | VHFWR2 | VHCDR2 | VHFWR3 | VHCDR3 | VHFWR4 |
|---|---|---|---|---|---|---|---|
| mJOVI. | EVRLQQ | GYVMH | WVKQRP | FINPYND | KATLTS | GAGYNF | WGQGTT |
| 1-H | SGPDLIK | (SEQ ID | GQGLEW | DIQSNER | DKSSTT | DGAYRF | LTVSS |
| | PGASVK | NO: 7346) | IG (SEQ | FRG | AYMELS | FDF (SEQ | (SEQ ID |
| | MSCKAS | | ID NO: | (SEQ ID | SLTSEDS | ID NO: | NO: 206) |
| | GYTFT | | 204) | NO: 201) | AVYYCA | 202) | |
| | (SEQ ID | | | | R (SEQ | | |
| | NO: 7370) | | | | ID NO: | | |
| | | | | | 205) | | |
| h1JOVI. | QVQLVQ | GYVMH | WVRQAP | FINPYND | RVTMTS | GAGYNF | WGQGTL |
| 1- | SGAEVK | (SEQ ID | GQGLEW | DIQSNER | DKSTTT | DGAYRF | VTVSS |
| H | KPGASV | NO: 7346) | MG (SEQ | FRG | AYMELS | FDF (SEQ | (SEQ ID |
| | KVSCKA | | ID NO: | (SEQ ID | SLRSEDT | ID NO: | NO: 210) |
| | SGYTFT | | 208) | NO: 201) | AVYYCA | 202) | |
| | (SEQ ID | | | | R (SEQ | | |
| | NO: 7348) | | | | ID NO: | | |
| | | | | | 209) | | |
| h2JOVI. | QVQLVQ | GYVMH | WVRQAP | FINPYND | WVTMTS | GAGYNF | WGQGTL |
| 1- | SGAEVK | (SEQ ID | GQGLEW | DIQSNER | DKSITTA | DGAYRF | VTVSS |
| H | KPGASV | NO: 7346) | MG (SEQ | FRG | YMELSR | FDF (SEQ | (SEQ ID |
| | KVSCKA | | ID NO: | (SEQ ID | LRSDDT | ID NO: | NO: 214) |
| | SGYTFT | | 212) | NO: 201) | AVYYCA | 202) | |
| | (SEQ ID | | | | R (SEQ | | |
| | NO: 7348) | | | | ID NO: | | |
| | | | | | 213) | | |
| h3JOVI. | QVQLVQ | GYVMH | WVRQAP | FINPYND | RVTITSD | GAGYNF | WGQGTL |
| 1- | SGAEVK | (SEQ ID | GQGLEW | DIQSNER | KSTTTA | DGAYRF | VTVSS |
| H | KPGSSV | NO: 7346) | MG (SEQ | FRG | YMELSS | FDF (SEQ | (SEQ ID |
| | KVSCKA | | ID NO: | (SEQ ID | LRSEDT | ID NO: | NO: 218) |
| | SGYTFT | | 216) | NO: 201) | AVYYCA | 202) | |
| | (SEQ ID | | | | R (SEQ | | |
| | NO: 7345) | | | | ID NO: | | |
| | | | | | 217) | | |
| h4JOVI. | QVQLVQ | GYVMH | WVRQAP | FINPYND | RVTITSD | GAGYNF | WGQGTL |
| 1- | SGAEVK | (SEQ ID | GQRLEW | DIQSNER | KSATTA | DGAYRF | VTVSS |
| H | KPGASV | NO: 7346) | MG (SEQ | FRG | YMELSS | FDF (SEQ | (SEQ ID |
| | KVSCKA | | ID NO: | (SEQ ID | LRSEDT | ID NO: | NO: 222) |
| | SGYTFT | | 220) | NO: 201) | AVYYCA | 202) | |
| | (SEQ ID | | | | R (SEQ | | |
| | NO: 7348) | | | | ID NO: | | |
| | | | | | 221) | | |
| h5JOVI. | QVQLVQ | GYVMH | WVRQAP | FINPYND | RVTITSD | GAGYNF | WGQGTT |
| 1- | SGAEVK | (SEQ ID | GQGLEW | DIQSNER | KSTTTA | DGAYRF | VTVSS |
| H | KPGSSV | NO: 7346) | MG (SEQ | FRG | YMELSS | FDF (SEQ | (SEQ ID |
| | KVSCKA | | ID NO: | (SEQ ID | LRSEDT | ID NO: | NO: 7347) |
| | SGYTFT | | 208) | NO: 201) | AVYYCA | 202) | |
| | (SEQ ID | | | | R (SEQ | | |
| | NO: 7345) | | | | ID NO: | | |
| | | | | | 217) | | |
| h6JOVI. | QVQLVQ | GYVMH | WVRQAP | FINPYND | RVTMTS | GAGYNF | WGQGTT |
| 1- | SGAEVK | (SEQ ID | GQGLEW | DIQSNER | DKSITTA | DGAYRF | VTVSS |
| H | KPGASV | NO: 7346) | MG (SEQ | FRG | YMELSR | FDF (SEQ | (SEQ ID |
| | KVSCKA | | ID NO: | (SEQ ID | LRSDDT | ID NO: | NO: 7347) |
| | SGYTFT | | 208) | NO: 201) | AVYYCA | 202) | |
| | (SEQ ID | | | | R (SEQ | | |
| | NO: 7348) | | | | ID NO: | | |
| | | | | | 7349) | | |
| H1 | QVQLVQ | GYAIS | WVRQAP | FINPYND | RVTITSD | GAGYNF | WGQGTL |
| germ- | SGAEVK | (SEQ ID | GQGLEW | DIQSNER | KSTTTA | DGAYRF | VTVSS |
| lined- | KPGSSV | NO: 7354) | MG (SEQ | FRG | YMELSS | FDF (SEQ | (SEQ ID |
| VH | KVSCKA | | ID NO: | (SEQ ID | LRSEDT | ID NO: | NO: 210) |
| | SGYTFS | | 208) | NO: 201) | AVYYCA | 202) | |
| | (SEQ ID | | | | R (SEQ | | |
| | NO: 7353) | | | | ID NO: | | |
| | | | | | 217) | | |
| H2 | QVQLVQ | GYVMH | WVRQAP | FIIPIFGT | RVTITSD | GAGYNF | WGQGTL |
| germ- | SGAEVK | (SEQ ID | GQGLEW | ANYAQK | KSTTTA | DGAYRF | VTVSS |
| lined- | KPGSSV | NO: 7346) | MG (SEQ | FQG | YMELSS | FDF (SEQ | (SEQ ID |
| VH | KVSCKA | | ID NO: | (SEQ ID | LRSEDT | ID NO: | NO: 210) |
| | SGYTFT | | 208) | NO: 7355) | AVYYCA | 202) | |
| | (SEQ ID | | | | R (SEQ | | |
| | NO: 7345) | | | | ID NO: | | |
| | | | | | 217) | | |
| H1/H2 | QVQLVQ | GYAIS | WVRQAP | FIIPIFGT | RVTITSD | GAGYNF | WGQGTL |
| germ- | SGAEVK | (SEQ ID | GQGLEW | ANYAQK | KSTTTA | DGAYRF | VTVSS |
| lined- | KPGSSV | NO: 7354) | MG (SEQ | FQG | YMELSS | FDF (SEQ | (SEQ ID |
| VH | KVSCKA | | ID NO: | (SEQ ID | LRSEDT | ID NO: | NO: 210) |
| | SGYTFS | | 208) | NO: 7355) | AVYYCA | 202) | |
| | (SEQ ID | | | | R (SEQ | | |
| | NO: 7353) | | | | ID NO: | | |
| | | | | | 217) | | |

TABLE 3
Exemplary light chain CDRs and FWRs of TRBC1-targeting antigen binding domains
derived from JOVI.1

| Ab ID | VLFWR1 | VLCDR1 | VLFWR2 | VLCDR2 | VLFWR3 | VLCDR3 | VLFWR4 |
|---|---|---|---|---|---|---|---|
| mJOVI. | DVVMT | RSSQRL | WYLQKP | RVSNRF | GVPDRF | SQSTHV | FGGGTK |
| 1-L | QSPLSLP | VHSNGN | GQSPKL | P (SEQ | SGSGSG | PYT | LEIK |
| | VSLGDQ | TYLH | LIY (SEQ | ID NO: | TDFTLKI | (SEQ ID | (SEQ ID |
| | ASISC | (SEQ ID | ID NO: | 224) | SRVEAE | NO: 225) | NO: 229) |
| | (SEQ ID | NO: 223) | 227) | | DLGIYF | | |
| | NO: 226) | | | | C (SEQ | | |
| | | | | | ID NO: | | |
| | | | | | 228) | | |
| h1JOVI. | DVVMT | RSSQRL | WYLQKP | RVSNRF | GVPDRF | SQSTHV | FGGGTK |
| 1-L | QSPLSLP | VHSNGN | GQSPQL | P (SEQ | SGSGSG | PYT | VEIK |
| | VTPGEP | TYLH | LIY (SEQ | ID NO: | TDFTLKI | (SEQ ID | (SEQ ID |
| | ASISC | (SEQ ID | ID NO: | 224) | SRVEAE | NO: 225) | NO: 233) |
| | (SEQ ID | NO: 223) | 231) | | DVGVYF | | |
| | NO: 230) | | | | C (SEQ | | |
| | | | | | ID NO: | | |
| | | | | | 232) | | |
| h2JOVI. | EVVMTQ | RSSQRL | WYQQK | RVSNRF | GIPDRFS | SQSTHV | FGGGTK |
| 1-L | SPGTLSL | VHSNGN | PGQAPR | P (SEQ | GSGSGT | PYT | VEIK |
| | SPGERA | TYLH | LLIY | ID NO: | DFTLTIS | (SEQ ID | (SEQ ID |
| | TLSC | (SEQ ID | (SEQ ID | 224) | RLEPED | NO: 225) | NO: 237) |
| | (SEQ ID | NO: 223) | NO: 235) | | FAVYFC | | |
| | NO: 234) | | | | (SEQ ID | | |
| | | | | | NO: 236) | | |
| h3JOVI. | DVVMT | RSSQRL | WYQQR | RVSNRF | GVPDRF | SQSTHV | FGGGTK |
| 1-L | QSPLSLP | VHSNGN | PGQSPR | P (SEQ | SGSGSG | PYT | VEIK |
| | VTLGQP | TYLH | LLIY | ID NO: | TDFTLKI | (SEQ ID | (SEQ ID |
| | ASISC | (SEQ ID | (SEQ ID | 224) | SRVEAE | NO: 225) | NO: 241) |
| | (SEQ ID | NO: 223) | NO: 239) | | DVGVYF | | |
| | NO: 238) | | | | C (SEQ | | |
| | | | | | ID NO: | | |
| | | | | | 240) | | |
| h4JOVI. | DVVMT | RSSQRL | WYLQKP | RVSNRF | GVPDRF | SQSTHV | FGGGTK |
| 1-L | QTPLSLP | VHSNGN | GQSPQL | P (SEQ | SGSGSG | PYT | VEIK |
| | VTPGEP | TYLH | LIY (SEQ | ID NO: | TDFTLKI | (SEQ ID | (SEQ ID |
| | ASISC | (SEQ ID | ID NO: | 224) | SRVEAE | NO: 225) | NO: 245) |
| | (SEQ ID | NO: 223) | 243) | | DVGVYF | | |
| | NO: 242) | | | | C (SEQ | | |
| | | | | | ID NO: | | |
| | | | | | 244) | | |
| h5JOVI. | DVVMT | RSSQRL | WYLQKP | RVSNRF | GVPDRF | SQSTHV | FGGGTK |
| 1-L | QTPLSLS | VHSNGN | GQSPQL | P (SEQ | SGSGSG | PYT | VEIK |
| | VTPGQP | TYLH | LIY (SEQ | ID NO: | TDFTLKI | (SEQ ID | (SEQ ID |
| | ASISC | (SEQ ID | ID NO: | 224) | SRVEAE | NO: 225) | NO: 249) |
| | (SEQ ID | NO: 223) | 247) | | DVGVYF | | |
| | NO: 246) | | | | C (SEQ | | |
| | | | | | ID NO: | | |
| | | | | | 248) | | |
| L1 | DVVMT | RSSQSL | WYQQR | RVSNRF | GVPDRF | SQSTHV | FGGGTK |
| germ- | QSPLSLP | VYSDGN | PGQSPR | P (SEQ | SGSGSG | PYT | VEIK |
| lined- | VTLGQP | TYH | LLIY | ID NO: | TDFTLKI | (SEQ ID | (SEQ ID |
| VL | ASISC | (SEQ ID | (SEQ ID | 224) | SRVEAE | NO: 225) | NO: 233) |
| | (SEQ ID | NO: | NO: 239) | | DVGVYF | | |
| | NO: 238) | 7367) | | | C (SEQ | | |
| | | | | | ID NO: | | |
| | | | | | 232) | | |
| L2 | DVVMT | RSSQRL | WYQQR | KVSNRD | GVPDRF | SQSTHV | FGGGTK |
| germ- | QSPLSLP | VHSNGN | PGQSPR | S (SEQ | SGSGSG | PYT | VEIK |
| lined- | VTLGQP | TYLH | LLIY | ID NO: | TDFTLKI | (SEQ ID | (SEQ ID |
| VL | ASISC | (SEQ ID | (SEQ ID | 7368) | SRVEAE | NO: 225) | NO: 233) |
| | (SEQ ID | NO: 223) | NO: 239) | | DVGVYF | | |
| | NO: 238) | | | | C (SEQ | | |
| | | | | | ID NO: | | |
| | | | | | 232) | | |
| L3 | DVVMT | RSSQRL | WYQQR | RVSNRF | GVPDRF | MQSTH | FGGGTK |
| germ- | QSPLSLP | VHSNGN | PGQSPR | P (SEQ | SGSGSG | WPYT | VEIK |
| lined- | VTLGQP | TYLH | LLIY | ID NO: | TDFTLKI | (SEQ ID | (SEQ ID |
| VL | ASISC | (SEQ ID | (SEQ ID | 224) | SRVEAE | NO: | NO: 233) |
| | (SEQ ID | NO: 223) | NO: 239) | | DVGVYF | 7369) | |
| | NO: 238) | | | | C (SEQ | | |
| | | | | | ID NO: | | |
| | | | | | 232) | | |
| L1/L2/ | DVVMT | RSSQSL | WYQQR | KVSNRD | GVPDRF | MQSTH | FGGGTK |
| germ- | QSPLSLP | VYSDGN | PGQSPR | S (SEQ | SGSGSG | WPYT | VEIK |
| lined- | VTLGQP | TYH | LLIY | ID NO: | TDFTLKI | (SEQ ID | (SEQ ID |
| VL | ASISC | (SEQ ID | (SEQ ID | 7368) | SRVEAE | NO: | NO: 233) |
| L3 | (SEQ ID | NO: | NO: 239) | | DVGVYF | 7369) | |
| | NO: 238) | 7367) | | | C (SEQ | | |
| | | | | | ID NO: | | |
| | | | | | 232) | | |

TABLE 3A
Exemplary heavy chain CDRs and FWRs of
TRBC1-targeting antigen binding
domains

| Ab ID | VHFWR1 | VHCDR1 | VHFWR2 | VHCDR2 | VHFWR3 | VHCDR3 | VHFWR4 |
|---|---|---|---|---|---|---|---|
| BKM | QVQLVQ | FTGYVM | WVRQAP | FIIPIFGT | RVTITSD | GAGYNF | WGQGTL |
| 0191 | SGAEVK | H (SEQ | GQGLEW | ANYAQK | KSTTTA | DGAYRF | VTVSS |
| | KPGSSV | ID NQ | MG (SEQ | FQG | YMELSS | FDF (SEQ | (SEQ ID |
| | KVSCKA | 281) | ID NO: | (SEQ ID | LRSEDT | ID NO: | NO: 286) |
| | SGYT | | 282) | NO: 283) | AVYYCA | 285) | |
| | (SEQ ID | | | | R (SEQ | | |
| | NO: 280) | | | | ID NO: | | |
| | | | | | 284) | | |
| BKM | QVQLVQ | FTGYVM | WVRQAP | FIIPIFGT | RVTITSD | GAGYNF | WGQGTL |
| 0192 | SGAEVK | H (SEQ | GQGLEW | ANYAQK | KSTTTA | DGAYRE | VTVSS |
| | KPGSSV | ID NO: | MG (SEQ | FQG | YMELSS | FDF (SEQ | (SEQ ID |
| | KVSCKA | 295) | ID NO: | (SEQ ID | LRSEDT | ID NO: | NO: 300) |
| | SGYT | | 296) | NO: 297) | AVYYCA | 299) | |
| | (SEQ ID | | | | R (SEQ ID | | |
| | NO: 294) | | | | NO: 298) | | |
| BKM | QVQLVQ | FTGYVM | WVRQAP | FIIPIFGT | RVTITSD | GAGYNF | WGQGTL |
| 0193 | SGAEVK | H (SEQ | GQGLEW | ANYAQK | KSTTTA | DGAYRE | VTVSS |
| | KPGSSV | ID NO: | MG (SEQ | FQG | YMELSS | FDF (SEQ | (SEQ ID |
| | KVSCKA | 309) | ID NO: | (SEQ ID | LRSEDT | ID NO: | NO: 314) |
| | SGYT | | 310) | NO: 311) | AVYYCA | 313) | |
| | (SEQ ID | | | | R (SEQ | | |
| | NO: 308) | | | | ID NO: | | |
| | | | | | 312) | | |
| BKM | QVQLVQ | FTGYVM | WVRQAP | FIIPIFGT | RVTITSD | GAGYNE | WGQGTL |
| 0194 | SGAEVK | H (SEQ | GQGLEW | ANYAQK | KSTTTA | DGAYRF | VTVSS |
| | KPGSSV | ID NO: | MG (SEQ | FQG | YMELSS | FDF (SEQ | (SEQ ID |
| | KVSCKA | 323) | ID NO: | (SEQ ID | LRSEDT | ID NO: | NO: 328) |
| | SGYT | | 324) | NO: 325) | AVYYCA | 327) | |
| | (SEQ ID | | | | R (SEQ | | |
| | NO: 322) | | | | ID NO: | | |
| | | | | | 326) | | |
| BKM | QVQLVQ | FTGYVM | WVRQAP | FIIPIFGT | RVTITSD | GAGYNE | WGQGTL |
| 0195 | SGAEVK | H (SEQ | GQGLEW | ANYAQK | KSTTTA | DGAYRF | VTVSS |
| | KPGSSV | ID NO: | MG (SEQ | FQG | YMELSS | FDF (SEQ | (SEQ ID |
| | KVSCKA | 337) | ID NO: | (SEQ ID | LRSEDT | ID NO: | NO: 342) |
| | SGYT | | 338) | NO: 339) | AVYYCA | 341) | |
| | (SEQ ID | | | | R (SEQ | | |
| | NO: 336) | | | | ID NO: | | |
| | | | | | 340) | | |
| BKM | QVQLVQ | FTGYVM | WVRQAP | FIIPIFGT | RVTITSD | GAGYNE | WGQGTL |
| 0196 | SGAEVK | H (SEQ | GQGLEW | ANYAQK | KSTTTA | DGAYRF | VTVSS |
| | KPGSSV | ID NO: | MG (SEQ | FQG | YMELSS | FDF (SEQ | (SEQ ID |
| | KVSCKA | 351) | ID NO: | (SEQ ID | LRSEDT | ID NO: | NO: 356) |
| | SGYT | | 352) | NO: 353) | AVYYCA | 355) | |
| | (SEQ ID | | | | R (SEQ | | |
| | NO: 350) | | | | ID NO: | | |
| | | | | | 354) | | |

TABLE 3B
Exemplary light chain CDRs and FWRs of
TRBC1-targeting antigen binding domains

| Ab ID | VLFWR1 | VLCDR1 | VLFWR2 | VLCDR2 | VLFWR3 | VLCDR3 | VLFWR4 |
|---|---|---|---|---|---|---|---|
| BKM0 | DVVMT | RSSQRL | WYQQR | RVSNRE | GVPDRF | SQSTHV | GGGTKV |
| 191 | QSPLSLP | VHSNAN | PGQSPR | P | SGSGSG | PYTF | EIK (SEQ |
| | VTLGQP | TYLH | LLIY | (SEQ | TDFTLKI | (SEQ ID | ID NO: |
| | ASISC | (SEQ ID | (SEQ ID | ID NO: | SRVEAE | NO: 278) | 279) |
| | (SEQ ID | NO: 274) | NO: 275) | 276) | DVGVYF | | |
| | NO: 273) | | | | C (SEQ | | |
| | | | | | ID NO: | | |
| | | | | | 277) | | |
| BKM0 | DVVMT | RSSQRL | WYQQR | RVSNRF | GVPDRF | SQSTHV | GGGTKV |
| 192 | QSPLSLP | VHSNGN | PGQSPR | P (SEQ | SGSGSG | PYTF | EIK (SEQ |
| | VTLGQP | AYLH | LLIY | ID NO: | TDFTLKI | (SEQ ID | ID NO: |
| | ASISC | (SEQ ID | (SEQ ID | 290) | SRVEAE | NO: 292) | 293) |
| | (SEQ ID | NO: 288) | NO: 289) | | DVGVYF | | |
| | NO: 287) | | | | C (SEQ | | |
| | | | | | ID NO: | | |
| | | | | | 291) | | |
| BKM0 | DVVMT | RSSQRL | WYQQR | RVSNRF | GVPDRF | SQSTHV | FGGGTK |
| 193 | QSPLSLP | VHSNAN | PGQSPR | P (SEQ | SGSGSG | PYT | VEIK |
| | VTLGQP | AYLH | LLIY | ID NO: | TDFTLKI | (SEQ ID | (SEQ ID |
| | ASISC | (SEQ ID | (SEQ ID | 304) | SRVEAE | NO: 306) | NO: 307) |
| | (SEQ ID | NO: 302) | NO: 303) | | DVGVYF | | |
| | NO: 301) | | | | C (SEQ | | |
| | | | | | ID NO: | | |
| | | | | | 305) | | |
| BKM0 | DVVMT | RSSQRL | WYQQR | RVSNRE | GVPDRF | SQSTHV | FGGGTK |
| 194 | QSPLSLP | VHSGGN | PGQSPR | P (SEQ | SGSGSG | PYT | VEIK |
| | VTLGQP | TYLH | LLIY | ID NO: | TDFTLKI | (SEQ ID | (SEQ ID |
| | ASISC | (SEQ ID | (SEQ ID | 318) | SRVEAE | NO: 320) | NO: 321) |
| | (SEQ ID | NO: 316) | NO: 317) | | DVGVYF | | |
| | NO: 315) | | | | C (SEQ | | |
| | | | | | ID NO: | | |
| | | | | | 319) | | |
| BKM0 | DVVMT | RSSQRL | WYQQR | RVSNRF | GVPDRF | SQSTHV | FGGGTK |
| 195 | QSPLSLP | VHSNGS | PGQSPR | P (SEQ | SGSGSG | PYT | VEIK |
| | VTLGQP | TYLH | LLIY | ID NO: | TDFTLKI | (SEQ ID | (SEQ ID |
| | ASISC | (SEQ ID | (SEQ ID | 332) | SRVEAE | NO: 334) | NO: 335) |
| | (SEQ ID | NO: 330) | NO: 331) | | DVGVYF | | |
| | NO: 329) | | | | C (SEQ | | |
| | | | | | ID NO: | | |
| | | | | | 333) | | |
| BKM0 | DVVMT | RSSQRL | WYQQR | RVSNRF | GVPDRF | SQSTHV | FGGGTK |
| 196 | QSPLSLP | VHSGGS | PGQSPR | P (SEQ | SGSGSG | PYT | VEIK |
| | VILGQP | TYLH | LLIY | ID NO: | TDFTLKI | (SEQ ID | (SEQ ID |
| | ASISC | (SEQ ID | (SEQ ID | 346) | SRVEAE | NO: 348) | NO: 349) |
| | (SEQ ID | NO: 344) | NO: 345) | | DVGVYF | | |
| | NO: 343) | | | | C (SEQ | | |
| | | | | | ID NO: | | |
| | | | | | 347) | | |

TABLE 4
Exemplary variable regions of TRBC1-
targeting antigen binding domains

| SEQ | | | |
|---|---|---|---|
| ID NO | Ab ID | Description | Sequence |
| SEQ | mJOVI.1- | JOVI.1 heavy | EVRLQQSGPDLIKPGASVKMSCKASGYTFTGY |
| ID NO: | H | chain variable | VMHWVKQRPGQGLEWIGFINPYNDDIQSNERF |
| 250 | | region | RGKATLTSDKSSTTAYMELSSLTSEDSAVYYC |
| | | | ARGAGYNFDGAYRFFDFWGQGTTLTVSS |
| SEQ | h1JOVI.1- | JOVI.1 heavy | QVQLVQSGAEVKKPGASVKVSCKASGYTFTGY |
| ID NO: | H | chain variable | VMHWVRQAPGQGLEWMGFINPYNDDIQSNERF |
| 251 | | region humanized | RGRVTMTSDKSTTTAYMELSSLRSEDTAVYY |
| | | variant 1 | CARGAGYNFDGAYRFFDFWGQGTLVTVSS |
| SEQ | h2JOVI.1- | JOVI.1 heavy | QVQLVQSGAEVKKPGASVKVSCKASGYTFTGY |
| ID NO: | H | chain variable | VMHWVRQAPGQGLEWMGFINPYNDDIQSNER |
| 252 | | region humanized | FRGWVTMTSDKSITTAYMELSRLRSDDTAVYY |
| | | variant 2 | CARGAGYNFDGAYRFFDFWGQGTLVTVSS |
| SEQ | h3JOVI.1- | JOVI.1 heavy | QVQLVQSGAEVKKPGSSVKVSCKASGYTFTGY |
| ID NO: | H | chain variable | VMHWVRQAPGQGLEWMGFINPYNDDIQSNER |
| 253 | | region humanized | FRGRVTITSDKSTTTAYMELSSLRSEDTAVYYC |
| | | variant 3 | ARGAGYNFDGAYRFFDFWGQGTLVTVSS |
| SEQ | h4JOVI.1- | JOVI.1 heavy | QVQLVQSGAEVKKPGASVKVSCKASGYTFTGY |
| ID NO: | H | chain variable | VMHWVRQAPGQRLEWMGFINPYNDDIQSNER |
| 254 | | region humanized | FRGRVTITSDKSATTAYMELSSLRSEDTAVYYC |
| | | variant 4 | ARGAGYNFDGAYRFFDFWGQGTLVTVSS |
| SEQ | h5JOVI.1- | JOVI.1 heavy | QVQLVQSGAEVKKPGSSVKVSCKASGYTFTGY |
| ID NO: | H | chain variable | VMHWVRQAPGQGLEWMGFINPYNDDIQSNER |
| 7343 | | region humanized | FRGRVTITSDKSTTTAYMELSSLRSEDTAVYYC |
| | | variant 5 | ARGAGYNFDGAYRFFDFWGQGTTVTVSS |
| SEQ | h6JOVI.1- | JOVI.1 heavy | QVQLVQSGAEVKKPGASVKVSCKASGYTFTGY |
| ID NO: | H | chain variable | VMHWVRQAPGQGLEWMGFINPYNDDIQSNER |
| 7344 | | region humanized | FRGRVTMTSDKSITTAYMELSRLRSDDTAVYY |
| | | variant 6 | CARGAGYNFDGAYRFFDFWGQGTTVTVSS |
| SEQ | H1 | JOVI.1 heavy | QVQLVQSGAEVKKPGSSVKVSCKASGYTFSGY |
| ID NO: | germlined- | chain variable | AISWVRQAPGQGLEWMGFINPYNDDIQSNERF |
| 7350 | VH | region humanized | RGRVTITSDKSTTTAYMELSSLRSEDTAVYYCA |
| | | H1 | RGAGYNFDGAYRFFDFWGQGTLVTVSS |
| SEQ | H2 | JOVI.1 heavy | QVQLVQSGAEVKKPGSSVKVSCKASGYTFTGY |
| ID NO: | germlined- | chain variable | VMHWVRQAPGQGLEWMGFIIPIFGTANYAQKF |
| 7351 | VH | region humanized | QGRVTITSDKSTTTAYMELSSLRSEDTAVYYCA |
| | | H2 | RGAGYNFDGAYRFFDFWGQGTLVTVSS |
| SEQ | H1/H2 | JOVI.1 heavy | QVQLVQSGAEVKKPGSSVKVSCKASGYTFSGY |
| ID NO: | germlined- | chain variable | AISWVRQAPGQGLEWMGFIIPIFGTANYAQKFQ |
| 7352 | VH | | |
| | | region humanized | GRVTITSDKSTTTAYMELSSLRSEDTAVYYCAR |
| | | H1/H2 | GAGYNFDGAYRFFDFWGQGTLVTVSS |
| SEQ | BKM0191 | BKM0191 G29A | QVQLVQSGAEVKKPGSSVKVSCKASGYTFTGY |
| ID NO: | VH | heavy chain | VMHWVRQAPGQGLEWMGFIIPIFGTANYAQKF |
| 261 | | variable region | QGRVTITSDKSTTTAYMELSSLRSEDTAVYYCA |
| | | | RGAGYNFDGAYRFFDFWGQGTLVTVSS |
| SEQ | BKM0192 | BKM0192 T31A | QVQLVQSGAEVKKPGSSVKVSCKASGYTFTGY |
| ID NO: | VH | heavy chain | VMHWVRQAPGQGLEWMGFIIPIFGTANYAQKF |
| 262 | | variable region | QGRVTITSDKSTTTAYMELSSLRSEDTAVYYCA |
| | | | RGAGYNFDGAYRFFDFWGQGTLVTVSS |
| SEQ | BKM0193 | BKM0193 G29a | QVQLVQSGAEVKKPGSSVKVSCKASGYTFTGY |
| ID NO: | VH | T31A heavy chain | VMHWVRQAPGQGLEWMGFIIPIFGTANYAQKF |
| 263 | | variable region | QGRVTITSDKSTTTAYMELSSLRSEDTAVYYCA |
| | | | RGAGYNFDGAYRFFDFWGQGTLVTVSS |
| SEQ | BKM0194 | BKM0194 N28G | QVQLVQSGAEVKKPGSSVKVSCKASGYTFTGY |
| ID NO: | VH | heavy chain | VMHWVRQAPGQGLEWMGFIIPIFGTANYAQKF |
| 264 | | variable region | QGRVTITSDKSTTTAYMELSSLRSEDTAVYYCA |
| | | | RGAGYNFDGAYRFFDFWGQGTLVTVSS |
| SEQ | BKM0195 | BKM0195 N30S | QVQLVQSGAEVKKPGSSVKVSCKASGYTFTGY |
| ID NO: | VH | heavy chain | VMHWVRQAPGQGLEWMGFIIPIFGTANYAQKF |
| 265 | | variable region | QGRVTITSDKSTTTAYMELSSLRSEDTAVYYCA |
| | | | RGAGYNFDGAYRFFDFWGQGTLVTVSS |
| SEQ | BKM0196 | BKM0196 N28G | QVQLVQSGAEVKKPGSSVKVSCKASGYTFTGY |
| ID NO: | VH | N30S heavy chain | VMHWVRQAPGQGLEWMGFIIPIFGTANYAQKF |
| 266 | | variable region | QGRVTITSDKSTTTAYMELSSLRSEDTAVYYCA |
| | | | RGAGYNFDGAYRFFDFWGQGTLVTVSS |
| SEQ | mJOVI.1-L | JOVI.1 light chain | DVVMTQSPLSLPVSLGDQASISCRSSQRLVHSN |
| ID NO: | | variable region | GNTYLHWYLQKPGQSPKLLIYRVSNRFPGVPD |
| 255 | | | RFSGSGSGTDFTLKISRVEAEDLGIYFCSQSTHV |
| | | | PYTFGGGTKLEIK |
| SEQ | h1JOVI.1- | JOVI.1 light chain | DVVMTQSPLSLPVTPGEPASISCRSSQRLVHSN |
| ID NO: | L | variable region | GNTYLHWYLQKPGQSPQLLIYRVSNRFPGVPD |
| 256 | | humanized variant | RFSGSGSGTDFTLKISRVEAEDVGVYFCSQSTH |
| | | 1 | VPYTFGGGTKVEIK |
| SEQ | h2JOVI.1- | JOVI.1 light chain | EVVMTQSPGTLSLSPGERATLSCRSSQRLVHSN |
| ID NO: | L | variable region | GNTYLHWYQQKPGQAPRLLIYRVSNRFPGIPDR |
| 257 | | humanized variant | FSGSGSGTDFTLTISRLEPEDFA VYFCSQSTHVP |
| | | 2 | YTFGGGTKVEIK |
| SEQ | h3JOVI.1- | JOVI.1 light chain | DVVMTQSPLSLPVTLGQPASISCRSSQRLVHSN |
| ID NO: | L | variable region | GNTYLHWYQQRPGQSPRLLIYRVSNRFPGVPD |
| 258 | | humanized variant | RFSGSGSGTDFTLKISRVEAEDVGVYFCSQSTH |
| | | 3 | VPYTFGGGTKVEIK |
| SEQ | h4JOVI.1- | JOVI.1 light chain | DVVMTQTPLSLPVTPGEPASISCRSSQRLVHSN |
| ID NO: | L | variable region | GNTYLHWYLQKPGQSPQLLIYRVSNRFPGVPD |
| 259 | | humanized variant | RFSGSGSGTDFTLKISRVEAEDVGVYFCSQSTH |
| | | 4 | VPYTFGGGTKVEIK |
| SEQ | h5JOVI.1- | JOVI.1 light chain | DVVMTQTPLSLSVTPGQPASISCRSSQRLVHSN |
| ID NO: | L | variable region | GNTYLHWYLQKPGQSPQLLIYRVSNRFPGVPD |
| 260 | | humanized variant | RFSGSGSGTDFTLKISRVEAEDVGVYFCSQSTH |
| | | 5 | VPYTFGGGTKVEIK |
| SEQ | L1 | JOVI.1 light chain | DVVMTQSPLSLPVTLGQPASISCRSSQSLVYSD |
| ID NO: | germlined- | variable region | GNTYHWYQQRPGQSPRLLIYRVSNRFPGVPDR |
| 7357 | VL | humanized L1 | FSGSGSGTDFTLKISRVEAEDVGVYFCSQSTHV |
| | | | PYTFGGGTKVEIK |
| SEQ | L2 | JOVI.1 light chain | DVVMTQSPLSLPVTLGQPASISCRSSQRLVHSN |
| ID NO: | germlined- | variable region | GNTYLHWYQQRPGQSPRLLIYKVSNRDSGVPD |
| 7358 | VL | humanized L2 | RFSGSGSGTDFTLKISRVEAEDVGVYFCSQSTH |
| | | | VPYTFGGGTKVEIK |
| SEQ | L3 | JOVI.1 light chain | DVVMTQSPLSLPVTLGQPASISCRSSQRLVHSN |
| ID NO: | germlined- | variable region | GNTYLHWYQQRPGQSPRLLIYRVSNRFPGVPD |
| 7359 | VL | humanized L3 | RFSGSGSGTDFTLKISRVEAEDVGVYFCMQSTH |
| | | | WPYTFGGGTKVEIK |
| SEQ | L1/L2/L3 | JOVI.1 light chain | DVVMTQSPLSLPVTLGQPASISCRSSQSLVYSD |
| ID NO: | germlined- | variable region | GNTYHWYQQRPGQSPRLLIYKVSNRDSGVPDR |
| 7360 | VL | humanized | FSGSGSGTDFTLKISRVEAEDVGVYFCMQSTH |
| | | L1/L2/L3 | WPYTFGGGTKVEIK |
| SEQ | BKM0191 | BKM0191 G29A | DVVMTQSPLSLPVTLGQPASISCRSSQRLVHSN |
| ID NO: | VL | light chain | ANTYLHWYQQRPGQSPRLLIYRVSNRFPGVPD |
| 267 | | variable region | RFSGSGSGTDFTLKISRVEAEDVGVYFCSQSTH |
| | | | VPYTFGGGTKVEIK |
| SEQ | BKM0192 | BKM0192 T31A | DVVMTQSPLSLPVTLGQPASISCRSSQRLVHSN |
| ID NO: | VL | light chain | GNAYLHWYQQRPGQSPRLLIYRVSNRFPGVPD |
| 268 | | variable region | RFSGSGSGTDFTLKISRVEAEDVGVYFCSQSTH |
| | | | VPYTFGGGTKVEIK |
| SEQ | BKM0193 | BKM0193 G29a | DVVMTQSPLSLPVTLGQPASISCRSSQRLVHSN |
| ID NO: | VL | T31A light chain | ANAYLHWYQQRPGQSPRLLIYRVSNRFPGVPD |
| 269 | | variable region | RFSGSGSGTDFTLKISRVEAEDVGVYFCSQSTH |
| | | | VPYTFGGGTKVEIK |
| SEQ | BKM0194 | BKM0194 N28G | DVVMTQSPLSLPVTLGQPASISCRSSQRLVHSG |
| ID NO: | VL | light chain | GNTYLHWYQQRPGQSPRLLIYRVSNRFPGVPD |
| 270 | | variable region | RFSGSGSGTDFTLKISRVEAEDVGVYFCSQSTH |
| | | | VPYTFGGGTKVEIK |
| SEQ | BKM0195 | BKM0195 N30S | DVVMTQSPLSLPVTLGQPASISCRSSQRLVHSN |
| ID NO: | VL | light chain | GSTYLHWYQQRPGQSPRLLIYRVSNRFPGVPD |
| 271 | | variable region | RFSGSGSGTDFTLKISRVEAEDVGVYFCSQSTH |
| | | | VPYTFGGGTKVEIK |
| SEQ | BKM0196 | BKM0196 N28G | DVVMTQSPLSLPVTLGQPASISCRSSQRLVHSG |
| ID NO: | VL | N30S light chain | GSTYLHWYQQRPGQSPRLLIYRVSNRFPGVPD |
| 272 | | variable region | RFSGSGSGTDFTLKISRVEAEDVGVYFCSQSTH |
| | | | VPYTFGGGTKVEIK |

TABLE 5
Exemplary TRBC1-targeting antigen binding domains/antibody molecules

| SEQ | | | |
|---|---|---|---|
| ID NO | Ab ID | Description | Sequence |
| SEQ | Ch(anti- | Anti-TRBC1 heavy | EVRLQQSGPDLIKPGASVKMSCKASGYTFTGYV |
| ID NO: | TRBC1) | chain | MHWVKQRPGQGLEWIGFINPYNDDIQSNERFRG |
| 6154 | HC | | KATLTSDKSSTTAYMELSSLTSEDSAVYYCARG |
| | N297A | | AGYNFDGAYRFFDFWGQGTTLTVSSASTKGPSV |
| | | | FPLAPSSKSTSGGTAALGCLVKDYFPEPVTVSW |
| | | | NSGALTSGVHTFPAVLQSSGLYSLSSVVTVPSSS |
| | | | LGTQTYICNVNHKPSNTKVDKRVEPKSCDKTHT |
| | | | CPPCPAPELLGGPSVFLFPPKPKDTLMISRTPEVT |
| | | | CVVVDVSHEDPEVKFNWYVDGVEVHNAKTKP |
| | | | REEQYASTYRVVSVLTVLHQDWLNGKEYKCKV |
| | | | SNKALPAPIEKTISKAKGQPREPQVYTLPPCREE |
| | | | MTKNQVSLWCLVKGFYPSDIAVEWESNGQPEN |
| | | | NYKTTPPVLDSDGSFFLYSKLTVDKSRWQQGNV |
| | | | FSCSVMHEALHNHYTQKSLSLSPGK |
| SEQ | Ch(anti- | Anti-TRBC1 heavy | EVRLQQSGPDLIKPGASVKMSCKASGYTFTGYV |
| ID NO: | TRBC1) | chain | MHWVKQRPGQGLEWIGFINPYNDDIQSNERFRG |
| 6155 | HC | | KATLTSDKSSTTAYMELSSLTSEDSAVYYCARG |
| | | | AGYNFDGAYRFFDFWGQGTTLTVSSASTKGPSV |
| | | | FPLAPSSKSTSGGTAALGCLVKDYFPEPVTVSW |
| | | | NSGALTSGVHTFPAVLQSSGLYSLSSVVTVPSSS |
| | | | LGTQTYICNVNHKPSNTKVDKRVEPKSCDKTHT |
| | | | CPPCPAPELLGGPSVFLFPPKPKDTLMISRTPEVT |
| | | | CVVVDVSHEDPEVKFNWYVDGVEVHNAKTKP |
| | | | REEQYNSTYRVVSVLTVLHQDWLNGKEYKCKV |
| | | | SNKALPAPIEKTISKAKGQPREPQVYTLPPCREE |
| | | | MTKNQVSLWCLVKGFYPSDIAVEWESNGQPEN |
| | | | NYKTTPPVLDSDGSFFLYSKLTVDKSRWQQGNV |
| | | | FSCSVMHEALHNHYTQKSLSLSPGK |
| SEQ | Ch(anti- | Anti-TRBC1 light | DVVMTQSPLSLPVSLGDQASISCRSSQRLVHSNG |
| ID NO: | TRBC1) | chain, e.g., a LC | NTYLHWYLQKPGQSPKLLIYRVSNRFPGVPDRF |
| 6156 | LC | Fab | SGSGSGTDFTLKISRVEAEDLGIYFCSQSTHVPYT |
| | | | FGGGTKLEIKRTVAAPSVFIFPPSDEQLKSGTASV |
| | | | VCLLNNFYPREAKVQWKVDNALQSGNSQESVT |
| | | | EQDSKDSTYSLSSTLTLSKADYEKHKVYACEVT |
| | | | HQGLSSPVTKSFNRGEC |
| SEQ | Ch(anti- | Anti-TRBC1 heavy | EVRLQQSGPDLIKPGASVKMSCKASGYTFTGYV |
| ID NO: | TRBC1) | chain, e.g., a HC | MHWVKQRPGQGLEWIGFINPYNDDIQSNERFRG |
| 6191 | HC | Fab | KATLTSDKSSTTAYMELSSLTSEDSAVYYCARG |
| | | | AGYNFDGAYRFFDFWGQGTTLTVSSASTKGPSV |
| | | | FPLAPSSKSTSGGTAALGCLVKDYFPEPVTVSW |
| | | | NSGALTSGVHTFPAVLQSSGLYSLSSVVTVPSSS |
| | | | LGTQTYICNVNHKPSNTKVDKRVEPKSC |
| SEQ | a_hTRB | Anti-TRBC1 heavy | METDTLLLWVLLLWVPGSTGQVQLVQSGAEVK |
| ID NO: | C1_Jovi1 | chain | KPGSSVKVSCKASGYTFTGYVMHWVRQAPGQG |
| 6167 | Hum5_ | | LEWMGFINPYNDDIQSNERFRGRVTITSDKSTTT |
| | VH- | | AYMELSSLRSEDTAVYYCARGAGYNFDGAYRF |
| | hCHIg_ | | FDFWGQGTLVTVSSASTKGPSVFPLAPSSKSTSG |
| | Hole_Cys- | | GTAALGCLVKDYFPEPVTVSWNSGALTSGVHTF |
| | Blank | | PAVLQSSGLYSLSSVVTVPSSSLGTQTYICNVNH |
| | | | KPSNTKVDKRVEPKSCDKTHTCPPCPAPELLGG |
| | | | PSVFLFPPKPKDTLMISRTPEVTCVVVDVSHEDP |
| | | | EVKFNWYVDGVEVHNAKTKPREEQYNSTYRV |
| | | | VSVLTVLHQDWLNGKEYKCKVSNKALPAPIEK |
| | | | TISKAKGQPREPQVCTLPPSREEMTKNQVSLSCA |
| | | | VKGFYPSDIAVEWESNGQPENNYKTTPPVLDSD |
| | | | GSFFLVSKLTVDKSRWQQGNVFSCSVMHEALH |
| | | | NHYTQKSLSLSPGK |
| SEQ | a_hTRB | Anti-TRBC1 heavy | METDTLLLWVLLLWVPGSTGQVQLVQSGAEVK |
| ID NO: | C1_Jovi1 | chain | KPGSSVKVSCKASGYTFTGYVMHWVRQAPGQG |
| 6168 | Hum5_ | | LEWMGFINPYNDDIQSNERFRGRVTITSDKSTTT |
| | VH- | | AYMELSSLRSEDTAVYYCARGAGYNFDGAYRF |
| | hCHIg- | | FDFWGQGTLVTVSSASTKGPSVFPLAPSSKSTSG |
| | Blank | | GTAALGCLVKDYFPEPVTVSWNSGALTSGVHTF |
| | | | PAVLQSSGLYSLSSVVTVPSSSLGTQTYICNVNH |
| | | | KPSNTKVDKRVEPKSCDKTHTCPPCPAPELLGG |
| | | | PSVFLFPPKPKDTLMISRTPEVTCVVVDVSHEDP |
| | | | EVKFNWYVDGVEVHNAKTKPREEQYNSTYRV |
| | | | VSVLTVLHQDWLNGKEYKCKVSNKALPAPIEK |
| | | | TISKAKGQPREPQVYTLPPSREEMTKNQVSLTCL |
| | | | VKGFYPSDIAVEWESNGQPENNYKTTPPVLDSD |
| | | | GSFFLYSKLTVDKSRWQQGNVFSCSVMHEALH |
| | | | NHYTQKSLSLSPGK |
| SEQ | a_hTRB | Anti-TRBC1 light | METDTLLLWVLLLWVPGSTGDVVMTQSPLSLP |
| ID NO: | C1_Jovi1 | chain | VTLGQPASISCRSSQRLVHSNGNTYLHWYQQRP |
| 6169 | Hum3_ | | GQSPRLLIYRVSNRFPGVPDRFSGSGSGTDFTLKI |
| | VL- | | SRVEAEDVGVYFCSQSTHVPYTFGGGTKVEIKR |
| | hCLIg_v | | TVAAPSVFIFPPSDEQLKSGTASVVCLLNNFYPR |
| | k-Blank | | EAKVQWKVDNALQSGNSQESVTEQDSKDSTYS |
| | | | LSSTLTLSKADYEKHKVYACEVTHQGLSSPVTK |
| | | | SFNRGEC |

### TRBC2 Antigen Binding Domains

[0319] In some embodiments, the antigen binding domain that binds to TRBC2 comprises one or more CDRs (e.g., VHCDR1, VHCDR2, VHCDR3, VLCDR1, VLCDR2, and/or VLCDR3) disclosed in Table 21 or Table 22, or a sequence having at least 85%, 90%, 95%, or 99% identity thereto. In some embodiments, the antigen binding domain that binds to TRBC2 comprises one or more framework regions (e.g., VHFWR1, VHFWR2, VHFWR3, VHFWR4, VLFWR1, VLFWR2, VLFWR3, and/or VLFWR4) disclosed in Table 21 or Table 22, or a sequence having at least 85%, 90%, 95%, or 99% identity thereto. In some embodiments, the antigen binding domain that binds to TRBC2 comprises a VH and/or a VL disclosed in Table 23, or a sequence having at least 85%, 90%, 95%, or 99% identity thereto. In some embodiments, the antigen binding domain that binds to TRBC2 comprises an amino acid sequence disclosed in Table 24, or a sequence having at least 85%, 90%, 95%, or 99% identity thereto.

[0320] In some embodiments, the antigen binding domain that binds to TRBC2 comprises a VH comprising a heavy chain complementarity determining region 1 (VHCDR1), a VHCDR2, and a VHCDR3, and a VL comprising a light chain complementarity determining region 1 (VLCDR1), a VLCDR2, and a VLCDR3.

[0321] In some embodiments, the VHCDR1, VHCDR2, and VHCDR3 comprise the amino acid sequences of GXlX2MH, wherein X1 is Y or F, and X2 is P, H, V, Y, K, or A, and SEQ ID NOs: 201, 7442, respectively (or a sequence having at least 85%, 90%, 95%, or 99% identity thereto). In some embodiments, the VHCDR1, VHCDR2, and VHCDR3 comprise the amino acid sequences of SEQ ID NOs: 7422, 201, and 7403, respectively (or a sequence having at least 85%, 90%, 95%, or 99% identity thereto). In some embodiments, the VHCDR1, VHCDR2, and VHCDR3 comprise the amino acid sequences of SEQ ID NOs: 7401, 201, and 7403, respectively (or a sequence having at least 85%, 90%, 95%, or 99% identity thereto). In some embodiments, the VHCDR1, VHCDR2, and VHCDR3 comprise the amino acid sequences of SEQ ID NOs: 7394, 201, and 7396, respectively (or a sequence having at least 85%, 90%, 95%, or 99% identity thereto). In some embodiments, the VHCDR1, VHCDR2, and VHCDR3 comprise the amino acid sequences of SEQ ID NOs: 7346, 201, and 7398, respectively (or a sequence having at least 85%, 90%, 95%, or 99% identity thereto). In some embodiments, the VHCDR1, VHCDR2, and VHCDR3 comprise the amino acid sequences of SEQ ID NOs: 7346, 201, and 7400, respectively (or a sequence having at least 85%, 90%, 95%, or 99% identity thereto). In some embodiments, the VHCDR1, VHCDR2, and VHCDR3 comprise the amino acid sequences of SEQ ID NOs: 7405, 201, and 7403, respectively (or a sequence having at least 85%, 90%, 95%, or 99% identity thereto). In some embodiments, the VHCDR1, VHCDR2, and VHCDR3 comprise the amino acid sequences of SEQ ID NOs: 7407, 201, and 7403, respectively (or a sequence having at least 85%, 90%, 95%, or 99% identity thereto). In some embodiments, the VHCDR1, VHCDR2, and VHCDR3 comprise the amino acid sequences of SEQ ID NOs: 7427, 201, and 7403, respectively (or a sequence having at least 85%, 90%, 95%, or 99% identity thereto). In some embodiments, the VHCDR1, VHCDR2, and VHCDR3 comprise the amino acid sequences of SEQ ID NOs: 7430, 201, and 7403, respectively (or a sequence having at least 85%, 90%, 95%, or 99% identity thereto).

[0322] In some embodiments, the VLCDR1, VLCDR2, and VLCDR3 comprise the amino acid sequences of SEQ ID NOs: 7443, 224, and 225, respectively (or a sequence having at least 85%, 90%, 95%, or 99% identity thereto). In some embodiments, the VLCDR1, VLCDR2, and VLCDR3 comprise the amino acid sequences of SEQ ID NOs: 7410, 224, and 225, respectively (or a sequence having at least 85%, 90%, 95%, or 99% identity thereto). In some embodiments, the VLCDR1, VLCDR2, and VLCDR3 comprise the amino acid sequences of SEQ ID NOs: 7409, 224, and 225, respectively (or a sequence having at least 85%, 90%, 95%, or 99% identity thereto).

[0323] In some embodiments, the VHCDR1, VHCDR2, VHCDR3, VLCDR1, VLCDR2, and VLCDR3 comprise the amino acid sequences of GXlX2MH, wherein X1 is Y or F, and X2 is P, H, V, Y, K, or A, and SEQ ID NOs: 201, 7442, 7443, 224, and 225, , respectively (or a sequence having at least 85%, 90%, 95%, or 99% identity thereto). In some embodiments, the VHCDR1, VHCDR2, VHCDR3, VLCDR1, VLCDR2, and VLCDR3 comprise the amino acid sequences of SEQ ID NOs: 7422, 201, 7403, 7410, 224, and 225, respectively (or a sequence having at least 85%, 90%, 95%, or 99% identity thereto). In some embodiments, the VHCDR1, VHCDR2, VHCDR3, VLCDR1, VLCDR2, and VLCDR3 comprise the amino acid sequences of SEQ ID NOs: 7401, 201, 7403, 7410, 224, and 225, respectively (or a sequence having at least 85%, 90%, 95%, or 99% identity thereto). In some embodiments, the VHCDR1, VHCDR2, VHCDR3, VLCDR1, VLCDR2, and VLCDR3 comprise the amino acid sequences of: SEQ ID NOs: 7394, 201, 7396, 7410, 224, and 225, respectively (or a sequence having at least 85%, 90%, 95%, or 99% identity thereto); SEQ ID NOs: 7346, 201, 7398, 7410, 224, and 225, respectively (or a sequence having at least 85%, 90%, 95%, or 99% identity thereto); SEQ ID NOs: 7346, 201, 7400, 7410, 224, and 225, respectively (or a sequence having at least 85%, 90%, 95%, or 99% identity thereto); SEQ ID NOs: 7405, 201, 7403, 7410, 224, and 225, respectively (or a sequence having at least 85%, 90%, 95%, or 99% identity thereto); SEQ ID NOs: 7407, 201, 7403, 7410, 224, and 225, respectively (or a sequence having at least 85%, 90%, 95%, or 99% identity thereto); SEQ ID NOs: 7427, 201, 7403, 7410, 224, and 225, respectively (or a sequence having at least 85%, 90%, 95%, or 99% identity thereto); SEQ ID NOs: 7430, 201, 7403, 7410, 224, and 225, respectively (or a sequence having at least 85%, 90%, 95%, or 99% identity thereto); SEQ ID NOs: 7422, 201, 7403, 7409, 224, and 225, respectively (or a sequence having at least 85%, 90%, 95%, or 99% identity thereto); SEQ ID NOs: 7401, 201, 7403, 7409, 224, and 225, respectively (or a sequence having at least 85%, 90%, 95%, or 99% identity thereto); SEQ ID NOs: 7394, 201, 7396, 7409, 224, and 225, respectively (or a sequence having at least 85%, 90%, 95%, or 99% identity thereto); SEQ ID NOs: 7346, 201, 7398, 7409, 224, and 225, respectively (or a sequence having at least 85%, 90%, 95%, or 99% identity thereto); SEQ ID NOs: 7346, 201, 7400, 7409, 224, and 225, respectively (or a sequence having at least 85%, 90%, 95%, or 99% identity thereto); SEQ ID NOs: 7405, 201, 7403, 7409, 224, and 225, respectively (or a sequence having at least 85%, 90%, 95%, or 99% identity thereto); SEQ ID NOs: 7407, 201, 7403, 7409, 224, and 225, respectively (or a sequence having at least 85%, 90%, 95%, or 99% identity thereto); SEQ ID NOs: 7427, 201, 7403, 7409, 224, and 225, respectively (or a sequence having at least 85%, 90%, 95%, or 99% identity thereto); or SEQ ID NOs: 7430, 201, 7403, 7409, 224, and 225, respectively (or a sequence having at least 85%, 90%, 95%, or 99% identity thereto).

[0324] In some embodiments, the VH comprises an amino acid sequence selected from the group consisting of SEQ ID NOs: 7420, 7423, 7411, 7412, 7413, 7414, 7415, 7416, 7417, 7425, 7428, and 7431 (or a sequence having at least 85%, 90%, 95%, or 99% identity thereto) and/or the VL comprises an amino acid sequence selected from the group consisting of SEQ ID NOs: 7419 and 7418 (or a sequence having at least 85%, 90%, 95%, or 99% identity thereto). In some embodiments, the VH and VL comprise the amino acid sequences of SEQ ID NOs: 7420 and 7419, respectively (or a sequence having at least 85%, 90%, 95%, or 99% identity thereto). In some embodiments, the VH and VL comprise the amino acid sequences of SEQ ID NOs: 7423 and 7419, respectively (or a sequence having at least 85%, 90%, 95%, or 99% identity thereto). In some embodiments, the VH and VL comprise the amino acid sequences of SEQ ID NOs: 7411 and 7419, respectively (or a sequence having at least 85%, 90%, 95%, or 99% identity thereto). In some embodiments, the VH and VL comprise the amino acid sequences of SEQ ID NOs: 7412 and 7419, respectively (or a sequence having at least 85%, 90%, 95%, or 99% identity thereto). In some embodiments, the VH and VL comprise the amino acid sequences of SEQ ID NOs: 7413 and 7419, respectively (or a sequence having at least 85%, 90%, 95%, or 99% identity thereto). In some embodiments, the VH and VL comprise the amino acid sequences of SEQ ID NOs: 7414 and 7419, respectively (or a sequence having at least 85%, 90%, 95%, or 99% identity thereto). In some embodiments, the VH and VL comprise the amino acid sequences of SEQ ID NOs: 7415 and 7419, respectively (or a sequence having at least 85%, 90%, 95%, or 99% identity thereto). In some embodiments, the VH and VL comprise the amino acid sequences of SEQ ID NOs: 7416 and 7419, respectively (or a sequence having at least 85%, 90%, 95%, or 99% identity thereto). In some embodiments, the VH and VL comprise the amino acid sequences of SEQ ID NOs: 7417 and 7419, respectively (or a sequence having at least 85%, 90%, 95%, or 99% identity thereto). In some embodiments, the VH and VL comprise the amino acid sequences of SEQ ID NOs: 7425 and 7419, respectively (or a sequence having at least 85%, 90%, 95%, or 99% identity thereto). In some embodiments, the VH and VL comprise the amino acid sequences of SEQ ID NOs: 7428 and 7419, respectively (or a sequence having at least 85%, 90%, 95%, or 99% identity thereto). In some embodiments, the VH and VL comprise the amino acid sequences of SEQ ID NOs: 7431 and 7419, respectively (or a sequence having at least 85%, 90%, 95%, or 99% identity thereto). In some embodiments, the VH and VL comprise the amino acid sequences of SEQ ID NOs: 7420 and 7418, respectively (or a sequence having at least 85%, 90%, 95%, or 99% identity thereto). In some embodiments, the VH and VL comprise the amino acid sequences of SEQ ID NOs: 7423 and 7418, respectively (or a sequence having at least 85%, 90%, 95%, or 99% identity thereto). In some embodiments, the VH and VL comprise the amino acid sequences of SEQ ID NOs: 7411 and 7418, respectively (or a sequence having at least 85%, 90%, 95%, or 99% identity thereto). In some embodiments, the VH and VL comprise the amino acid sequences of SEQ ID NOs: 7412 and 7418, respectively (or a sequence having at least 85%, 90%, 95%, or 99% identity thereto). In some embodiments, the VH and VL comprise the amino acid sequences of SEQ ID NOs: 7413 and 7418, respectively (or a sequence having at least 85%, 90%, 95%, or 99% identity thereto). In some embodiments, the VH and VL comprise the amino acid sequences of SEQ ID NOs: 7414 and 7418, respectively (or a sequence having at least 85%, 90%, 95%, or 99% identity thereto). In some embodiments, the VH and VL comprise the amino acid sequences of SEQ ID NOs: 7415 and 7418, respectively (or a sequence having at least 85%, 90%, 95%, or 99% identity thereto). In some embodiments, the VH and VL comprise the amino acid sequences of SEQ ID NOs: 7416 and 7418, respectively (or a sequence having at least 85%, 90%, 95%, or 99% identity thereto). In some embodiments, the VH and VL comprise the amino acid sequences of SEQ ID NOs: 7417 and 7418, respectively (or a sequence having at least 85%, 90%, 95%, or 99% identity thereto). In some embodiments, the VH and VL comprise the amino acid sequences of SEQ ID NOs: 7425 and 7418, respectively (or a sequence having at least 85%, 90%, 95%, or 99% identity thereto). In some embodiments, the VH and VL comprise the amino acid sequences of SEQ ID NOs: 7428 and 7418, respectively (or a sequence having at least 85%, 90%, 95%, or 99% identity thereto). In some embodiments, the VH and VL comprise the amino acid sequences of SEQ ID NOs: 7431 and 7418, respectively (or a sequence having at least 85%, 90%, 95%, or 99% identity thereto).

[0325] In some embodiments, the antigen binding domain that binds to TRBC2 comprises an amino acid sequence selected from the group consisting of SEQ ID NOs: 7433, 7434, 7435, 7436, and 7437 (or a sequence having at least 85%, 90%, 95%, or 99% identity thereto).

TABLE 21
Exemplary heavy chain CDRs and FWRs of TRBC2-targeting
antigen binding domains

| Ab ID | VHFWR1 | VHCDR1 | VHFWR2 | VHCDR2 | VHFWR3 | VHCDR3 | VHFWR4 |
|---|---|---|---|---|---|---|---|
| JVD3- | QVQLVQ | GFVMH | WVRQAP | FINPYND | RVTMTS | GNGMW | WGQGTL |
| VH | SGAEVK | (SEQ ID | GQGLEW | DIQSNER | DKSTTT | FDGAYR | VTVSS |
| | KPGASV | NO: 7394) | MG (SEQ | FRG | AYMELS | FFDF | (SEQ ID |
| | KVSCKA | | ID NO: | (SEQ ID | SLRSEDT | (SEQ ID | NO: 210) |
| | SGYTFP | | 208) | NO: 201) | AVYYCA | NO: 7396) | |
| | (SEQ ID | | | | R (SEQ | | |
| | NO: 7393) | | | | ID NO: | | |
| | | | | | 209) | | |
| JVD4- | QVQLVQ | GYVMH | WVRQAP | FINPYND | RVTMTS | GNGKNF | WGQGTL |
| VH | SGAEVK | (SEQ ID | GQGLEW | DIQSNER | DKSTTT | DGAYRF | VTVSS |
| | KPGASV | NO: 7346) | MG (SEQ | FRG | AYMELS | FDF (SEQ | (SEQ ID |
| | KVSCKA | | ID NO: | (SEQ ID | SLRSEDT | ID NO: | NO: 210) |
| | SGYPFH | | 208) | NO: 201) | AVYYCA | 7398) | |
| | (SEQ ID | | | | R (SEQ | | |
| | NO: 7397) | | | | ID NO: | | |
| | | | | | 209) | | |
| JVD5- | QVQLVQ | GYVMH | WVRQAP | FINPYND | RVTMTS | GNGKW | WGQGTL |
| VH | SGAEVK | (SEQ ID | GQGLEW | DIQSNER | DKSTTT | FDGAYR | VTVSS |
| | KPGASV | NO: 7346) | MG (SEQ | FRG | AYMELS | FFDF | (SEQ ID |
| | KVSCKA | | ID NO: | (SEQ ID | SLRSEDT | (SEQ ID | NO: 210) |
| | SGYTYP | | 208) | NO: 201) | AVYYCA | NO: 7400) | |
| | (SEQ ID | | | | R (SEQ | | |
| | NO: 7399) | | | | ID NO: | | |
| | | | | | 209) | | |
| JVD6- | QVQLVQ | GYHMH | WVRQAP | FINPYND | RVTMTS | GNGKW | WGQGTL |
| VH | SGAEVK | (SEQ ID | GQGLEW | DIQSNER | DKSTTT | GDGAYR | VTVSS |
| | KPGASV | NO: 7401) | MG (SEQ | FRG | AYMELS | FFDF | (SEQ ID |
| | KVSCKA | | ID NO: | (SEQ ID | SLRSEDT | (SEQ ID | NO: 210) |
| | SNQNFH | | 208) | NO: 201) | AVYYCA | NO: 7403) | |
| | (SEQ ID | | | | R (SEQ | | |
| | NO: 7402) | | | | ID NO: | | |
| | | | | | 209) | | |
| JVD7- | QVQLVQ | GFYMH | WVRQAP | FINPYND | RVTMTS | GNGKW | WGQGTL |
| VH | SGAEVK | (SEQ ID | GQGLEW | DIQSNER | DKSTTT | GDGAYR | VTVSS |
| | KPGASV | NO: 7405) | MG (SEQ | FRG | AYMELS | FFDF | (SEQ ID |
| | KVSCKA | | ID NO: | (SEQ ID | SLRSEDT | (SEQ ID | NO: 210) |
| | SSQNFH | | 208) | NO: 201) | AVYYCA | NO: 7403) | |
| | (SEQ ID | | | | R (SEQ | | |
| | NO: 7404) | | | | ID NO: | | |
| | | | | | 209) | | |
| JVD8- | QVQLVQ | GYKMH | WVRQAP | FINPYND | RVTMTS | GNGKW | WGQGTL |
| VH | SGAEVK | (SEQ ID | GQGLEW | DIQSNER | DKSTTT | GDGAYR | VTVSS |
| | KPGASV | NO: 7407) | MG (SEQ | FRG | AYMELS | FFDF | (SEQ ID |
| | KVSCKA | | ID NO: | (SEQ ID | SLRSEDT | (SEQ ID | NO: 210) |
| | SYQDFH | | 208) | NO: 201) | AVYYCA | NO: 7403) | |
| | (SEQ ID | | | | R (SEQ | | |
| | NO: 7406) | | | | ID NO: | | |
| | | | | | 209) | | |
| JVD9- | QVQLVQ | GFYMH | WVRQAP | FINPYND | RVTMTS | GNGKW | WGQGTL |
| VH | SGAEVK | (SEQ ID | GQGLEW | DIQSNER | DKSTTT | GDGAYR | VTVSS |
| | KPGASV | NO: 7405) | MG (SEQ | FRG | AYMELS | FFDF | (SEQ ID |
| | KVSCKA | | ID NO: | (SEQ ID | SLRSEDT | (SEQ ID | NO: 210) |
| | SGYNFH | | 208) | NO: 201) | AVYYCA | NO: 7403) | |
| | (SEQ ID | | | | R (SEQ | | |
| | NO: 7408) | | | | ID NO: | | |
| | | | | | 209) | | |
| BKM | QVQLVQ | GYPMH | WVRQAP | FINPYND | RVTMTS | GNGKW | WGQGTL |
| 0097 | SGAEVK | (SEQ ID | GQGLEW | DIQSNER | DKSTTT | GDGAYR | VTVSS |
| anti- | KPGASV | NO: 7422) | MG (SEQ | FRG | AYMELS | FFDF | (SEQ ID |
| TRBC | KVSCKA | | ID NO: | (SEQ ID | SLRSEDT | (SEQ ID | NO: 210) |
| 2 VH; | STSGFH | | 208) | NO: 201) | AVYYCA | NO: 7403) | |
| BJM1 | (SEQ ID | | | | R (SEQ | | |
| 184 | NO: 7421) | | | | ID NO: | | |
| VH | | | | | 209) | | |
| BKM | QVQLVQ | GYHMH | WVRQAP | FINPYND | RVTMTS | GNGKW | WGQGTL |
| 0098 | SGAEVK | (SEQ ID | GQGLEW | DIQSNER | DKSTTT | GDGAYR | VTVSS |
| anti- | KPGASV | NO: 7401) | MG (SEQ | FRG | AYMELS | FFDF | (SEQ ID |
| TRBC | KVSCKA | | ID NO: | (SEQ ID | SLRSEDT | (SEQ ID | NO: 210) |
| 2 VH; | SPRGFH | | 208) | NO: 201) | AVYYCA | NO: 7403) | |
| BJM1 | (SEQ ID | | | | R (SEQ | | |
| 185 | NO: 7424) | | | | ID NO: | | |
| VH | | | | | 209) | | |
| BJM1 | QVQLVQ | GYAMH | WVRQAP | FINPYND | RVTMTS | GNGKW | WGQGTL |
| 186 | SGAEVK | (SEQ ID | GQGLEW | DIQSNER | DKSTTT | GDGAYR | VTVSS |
| VH | KPGASV | NO: 7427) | MG (SEQ | FRG | AYMELS | FFDF | (SEQ ID |
| | KVSCKA | | ID NO: | (SEQ ID | SLRSEDT | (SEQ ID | NO: 210) |
| | SFQDFH | | 208) | NO: 201) | AVYYCA | NO: 7403) | |
| | (SEQ ID | | | | R (SEQ | | |
| | NO: 7426) | | | | ID NO: | | |
| | | | | | 209) | | |
| BJM1 | QVQLVQ | GFAMH | WVRQAP | FINPYND | RVTMTS | GNGKW | WGQGTL |
| 187 | SGAEVK | (SEQ ID | GQGLEW | DIQSNER | DKSTTT | GDGAYR | VTVSS |
| VH | KPGASV | NO: 7430) | MG (SEQ | FRG | AYMELS | FFDF | (SEQ ID |
| | KVSCKA | | ID NO: | (SEQ ID | SLRSEDT | (SEQ ID | NO: 210) |
| | SSKDFH | | 208) | NO: 201) | AVYYCA | NO: 7403) | |
| | (SEQ ID | | | | R (SEQ | | |
| | NO: 7429) | | | | ID NO: | | |
| | | | | | 209) | | |
| BC2 | QVQLVQ | GYHMH | WVRQAP | FINPYND | RVTMTS | GNGKW | WGQGTL |
| YR3 | SGAEVK | (SEQ ID | GQGLEW | DIQSNER | DKSTTT | GDGAYR | VTVSS |
| B11- | KPGASV | NO: 7401) | MG (SEQ | FRG | AYMELS | FFDF | (SEQ ID |
| scFv | KVSCKA | | ID NO: | (SEQ ID | SLRSEDT | (SEQ ID | NO: 210) |
| VH | SPKGFH | | 208) | NO: 201) | AVYYCA | NO: 7403) | |
| | (SEQ ID | | | | R (SEQ | | |
| | NO: 7432) | | | | ID NO: | | |
| | | | | | 209) | | |
| Consensus | | GX1X2M | | FINPYND | | GNGX1X | |
| VHC | | H, | | DIQSNER | | 2X3DGA | |
| DR | | wherein | | FRG | | YRFFDF, | |
| | | X1 is Y or | | (SEQ ID | | wherein | |
| | | F, and X2 | | NO: 201) | | X1 is K or | |
| | | is P, H, V, | | | | M, X2 is | |
| | | Y, K, or A | | | | W or N, | |
| | | | | | | and X3 is | |
| | | | | | | Gor F | |
| | | | | | | (SEQ ID | |
| | | | | | | NO: 7442) | |

TABLE 22
Exemplary light chain CDRs and FWRs of TRBC2-
targeting antigen binding domains

| Ab ID | VLFWR1 | VLCDR1 | VLFWR2 | VLCDR2 | VLFWR3 | VLCDR3 | VLFWR4 |
|---|---|---|---|---|---|---|---|
| JVD2- | DVVMT | RSSQNL | WYLQKP | RVSNRF | GVPDRF | SQSTHV | FGGGTK |
| VL | QSPLSLP | VHSNGR | GQSPQL | P (SEQ ID | SGSGSG | PYT | VEIK |
| | VTPGEP | TYLH | LIY (SEQ | NO: 224) | TDFTLKI | (SEQ ID | (SEQ ID |
| | ASISC | (SEQ ID | ID NO: | | SRVEAE | NO: 225) | NO: 233) |
| | (SEQ ID | NO: 7409) | 231) | | DVGVYF | | |
| | NO: 230) | | | | C (SEQ | | |
| | | | | | ID NO: | | |
| | | | | | 232) | | |
| JVD3 | DVVMT | RSSQNL | WYLQKP | RVSNRF | GVPDRF | SQSTHV | FGGGTK |
| 4-VL | QSPLSLP | VHSNGR | GQSPQL | P (SEQ ID | SGSGSG | PYT | VEIK |
| | VTPGEP | TYLQ | LIY (SEQ | NO: 224) | TDFTLKI | (SEQ ID | (SEQ ID |
| | ASISC | (SEQ ID | ID NO: | | SRVEAE | NO: 225) | NO: 233) |
| | (SEQ ID | NO: 7410) | 231) | | DVGVYF | | |
| | NO: 230) | | | | C (SEQ | | |
| | | | | | ID NO: | | |
| | | | | | 232) | | |
| Consensus | | RSSQNL | | RVSNRF | | SQSTHV | |
| LHC | | VHSNGR | | P (SEQ ID | | PYT | |
| DR | | TYLX, | | NO: 224) | | (SEQ ID | |
| | | wherein X | | | | NO: 225) | |
| | | is Q or H | | | | | |
| | | (SEQ ID | | | | | |
| | | NO: 7443) | | | | | |

TABLE 23
Exemplary variable regions of TRBC2-targeting antigen binding domains

| SEQ ID | | |
|---|---|---|
| NO | Description | Sequence |
| SEQ ID | JVD3-VH | QVQLVQSGAEVKKPGASVKVSCKASGYTFPGFVMHWVRQAP |
| NO: | | GQGLEWMGFINPYNDDIQSNERFRGRVTMTSDKSTTTAYMELS |
| 7411 | | SLRSEDTAVYYCARGNGMWFDGAYRFFDFWGQGTLVTVSS |
| SEQ ID | JVD4-VH | QVQLVQSGAEVKKPGASVKVSCKASGYPFHGYVMHWVRQAP |
| NO: | | GQGLEWMGFINPYNDDIQSNERFRGRVTMTSDKSTTTAYMELS |
| 7412 | | SLRSEDTAVYYCARGNGKNFDGAYRFFDFWGQGTLVTVSS |
| SEQ ID | JVD5-VH | QVQLVQSGAEVKKPGASVKVSCKASGYTYPGYVMHWVRQAP |
| NO: | | GQGLEWMGFINPYNDDIQSNERFRGRVTMTSDKSTTTAYMELS |
| 7413 | | SLRSEDTAVYYCARGNGKWFDGAYRFFDFWGQGTLVTVSS |
| SEQ ID | JVD6-VH | QVQLVQSGAEVKKPGASVKVSCKASNQNFHGYHMHWVRQAP |
| NO: | | GQGLEWMGFINPYNDDIQSNERFRGRVTMTSDKSTTTAYMELS |
| 7414 | | SLRSEDTAVYYCARGNGKWGDGAYRFFDFWGQGTLVTVSS |
| SEQ ID | JVD7-VH | QVQLVQSGAEVKKPGASVKVSCKASSQNFHGFYMHWVRQAP |
| NO: | | GQGLEWMGFINPYNDDIQSNERFRGRVTMTSDKSTTTAYMELS |
| 7415 | | SLRSEDTAVYYCARGNGKWGDGAYRFFDFWGQGTLVTVSS |
| SEQ ID | JVD8-VH | QVQLVQSGAEVKKPGASVKVSCKASYQDFHGYKMHWVRQAP |
| NO: | | GQGLEWMGFINPYNDDIQSNERFRGRVTMTSDKSTTTAYMELS |
| 7416 | | SLRSEDTAVYYCARGNGKWGDGAYRFFDFWGQGTLVTVSS |
| SEQ ID | JVD9-VH | QVQLVQSGAEVKKPGASVKVSCKASGYNFHGFYMHWVRQAP |
| NO: | | GQGLEWMGFINPYNDDIQSNERFRGRVTMTSDKSTTTAYMELS |
| 7417 | | SLRSEDTAVYYCARGNGKWGDGAYRFFDFWGQGTLVTVSS |
| SEQ ID | BKM0097 | QVQLVQSGAEVKKPGASVKVSCKASTSGFHGYPMHWVRQAP |
| NO: | anti-TRBC2 | GQGLEWMGFINPYNDDIQSNERFRGRVTMTSDKSTTTAYMELS |
| 7420 | VH: BJM1184 | SLRSEDTAVYYCARGNGKWGDGAYRFFDFWGQGTLVTVSS |
| | VH | |
| SEQ ID | BKM0098 | QVQLVQSGAEVKKPGASVKVSCKASPRGFHGYHMHWVRQAP |
| NO: | anti-TRBC2 | GQGLEWMGFINPYNDDIQSNERFRGRVTMTSDKSTTTAYMELS |
| 7423 | VH; BJM1185 | SLRSEDTAVYYCARGNGKWGDGAYRFFDFWGQGTLVTVSS |
| | VH | |
| SEQ ID | BJM1186 VH | QVQLVQSGAEVKKPGASVKVSCKASFQDFHGYAMHWVRQAP |
| NO: | | GQGLEWMGFINPYNDDIQSNERFRGRVTMTSDKSTTTAYMELS |
| 7425 | | SLRSEDTAVYYCARGNGKWGDGAYRFFDFWGQGTLVTVSS |
| SEQ ID | BJM1187 VH | QVQLVQSGAEVKKPGASVKVSCKASSKDFHGFAMHWVRQAP |
| NO: | | GQGLEWMGFINPYNDDIQSNERFRGRVTMTSDKSTTTAYMELS |
| 7428 | | SLRSEDTAVYYCARGNGKWGDGAYRFFDFWGQGTLVTVSS |
| SEQ ID | BC2 YR3 B1 | QVQLVQSGAEVKKPGASVKVSCKASPKGFHGYHMHWVRQAP |
| NO: | 1-scFv VH | GQGLEWMGFINPYNDDIQSNERFRGRVTMTSDKSTTTAYMELS |
| 7431 | | SLRSEDTAVYYCARGNGKWGDGAYRFFDFWGQGTLVTVSS |
| SEQ ID | JVD2-VL | DVVMTQSPLSLPVTPGEPASISCRSSQNLVHSNGRTYLHWYLQ |
| NO: | | KPGQSPQLLIYRVSNRFPGVPDRFSGSGSGTDFTLKISRVEAEDV |
| 7418 | | GVYFCSQSTHVPYTFGGGTKVEIK |
| SEQ ID | JVD34-VL | DVVMTQSPLSLPVTPGEPASISCRSSQNLVHSNGRTYLQWYLQ |
| NO: | | KPGQSPQLLIYRVSNRFPGVPDRFSGSGSGTDFTLKISRVEAEDV |
| 7419 | | GVYFCSQSTHVPYTFGGGTKVEIK |

TABLE 24
Exemplary TRBC2-targeting antigen binding domains/antibody molecules

| SEQ ID | | |
|---|---|---|
| NO | Description | Sequence |
| SEQ ID | BC2 YR3- | QVQLVQSGAEVKKPGASVKVSCKASTSGFHGYPMHWVRQAPGQ |
| 7433 | (BJM1184) | GLEWMGFINPYNDDIQSNERFRGRVTMTSDKSTTTAYMELSSLRS |
| NO: | A12-scFv | EDTAVYYCARGNGKWGDGAYRFFDFWGQGTLVTVSSGGGGSGG |
| | | GGSGGGGSGGGGSDVVMTQSPLSLPVTPGEPASISCRSSQNLVHS |
| | | NGRTYLQWYLQKPGQSPQLLIYRVSNRFPGVPDRFSGSGSGTDFT |
| | | LKISRVEAEDVGVYFCSQSTHVPYTFGGGTKVEIK |
| SEQ ID | BC2 YR3- | QVQLVQSGAEVKKPGASVKVSCKASPRGFHGYHMHWVRQAPGQ |
| 7434 | (BJM1185) | GLEWMGFINPYNDDIQSNERFRGRVTMTSDKSTTTAYMELSSLRS |
| NO: | A5-scFv | EDTAVYYCARGNGKWGDGAYRFFDFWGQGTLVTVSSGGGGSGG |
| | | GGSGGGGSGGGGSDVVMTQSPLSLPVTPGEPASISCRSSQNLVHS |
| | | NGRTYLQWYLQKPGQSPQLLIYRVSNRFPGVPDRFSGSGSGTDFT |
| | | LKISRVEAEDVGVYFCSQSTHVPYTFGGGTKVEIK |
| SEQ ID | BC2 YR3- | QVQLVQSGAEVKKPGASVKVSCKASFQDFHGYAMHWVRQAPGQ |
| 7435 | (BJM1186) | GLEWMGFINPYNDDIQSNERFRGRVTMTSDKSTTTAYMELSSLRS |
| NO: | B3-scFv | EDTAVYYCARGNGKWGDGAYRFFDFWGQGTLVTVSSGGGGSGG |
| | | GGSGGGGSGGGGSDVVMTQSPLSLPVTPGEPASISCRSSQNLVHS |
| | | NGRTYLQWYLQKPGQSPQLLIYRVSNRFPGVPDRFSGSGSGTDFT |
| | | LKISRVEAEDVGVYFCSQSTHVPYTFGGGTKVEIK |
| SEQ ID | BC2 YR3 | QVQLVQSGAEVKKPGASVKVSCKASSKDFHGFAMHWVRQAPGQ |
| NO: | B4-scFv | GLEWMGFINPYNDDIQSNERFRGRVTMTSDKSTTTAYMELSSLRS |
| 7436 | (BJM1187) | EDTAVYYCARGNGKWGDGAYRFFDFWGQGTLVTVSSGGGGSGG |
| | | GGSGGGGSGGGGSDVVMTQSPLSLPVTPGEPASISCRSSQNLVHS |
| | | NGRTYLQWYLQKPGQSPQLLIYRVSNRFPGVPDRFSGSGSGTDFT |
| | | LKISRVEAEDVGVYFCSQSTHVPYTFGGGTKVEIK |
| SEQ ID | BC2 YR3 | QVQLVQSGAEVKKPGASVKVSCKASPKGFHGYHMHWVRQAPGQ |
| NO: | B11-scFv | GLEWMGFINPYNDDIQSNERFRGRVTMTSDKSTTTAYMELSSLRS |
| 7437 | | EDTAVYYCARGNGKWGDGAYRFFDFWGQGTLVTVSSGGGGSGG |
| | | GGSGGGGSGGGGSDVVMTQSPLSLPVTPGEPASISCRSSQNLVHS |
| | | NGRTYLQWYLQKPGQSPQLLIYRVSNRFPGVPDRFSGSGSGTDFT |
| | | LKISRVEAEDVGVYFCSQSTHVPYTFGGGTKVEIK |

Antibody Molecules that Bind to TRBC1/TRBC2 and NKp30

[0326] In some embodiments, the disclosure features a multifunctional antibody molecule that binds to TRBC1 and NKp30. In some embodiments, the multifunctional antibody molecule comprises a configuration shown in any of FIGS. 29A-29D. In some embodiments, the multifunctional antibody molecule comprises an anti-TRBC1 Fab. In some embodiments, the multifunctional antibody molecule comprises an anti-TRBC1 scFv. In some embodiments, the multifunctional antibody molecule comprises an anti-NKp30 Fab. In some embodiments, the multifunctional antibody molecule comprises an anti-NKp30 scFv. In some embodiments, the multifunctional antibody molecule comprises an anti-TRBC1 Fab and an anti-NKp30 scFv, e.g., comprises a configuration shown in FIG. 29A. In some embodiments, the multifunctional antibody molecule comprises an anti-TRBC1 Fab and an anti-NKp30 Fab, e.g., comprises a configuration shown in FIG. 29B. In some embodiments, the multifunctional antibody molecule comprises an anti-NKp30 Fab and an anti-TRBC1 scFv, e.g., comprises a configuration shown in FIG. 29C. In some embodiments, the multifunctional antibody molecule comprises an anti-TRBC1 scFv and an anti-NKp30 scFv, e.g., comprises a configuration shown in FIG. 29D. In some embodiments, the multifunctional antibody molecule comprises an anti-TRBC1 antigen binding domain disclosed herein, e.g., an anti-TRBC1 antigen binding domain disclosed in Tables 2, 3, 3A, 3B, 4, 5, or 6. In some embodiments, the multifunctional antibody molecule comprises an anti-NKp30 antigen binding domain disclosed herein, e.g., an anti-NKp30 antigen binding domain disclosed in Tables 7, 8, 8A, 8B, 9, 10 and 18.

[0327] In some embodiments, exemplary multifunctional antibody molecules that bind to TRBC1 and NKp30 are disclosed in Table 19.

[0328] In some embodiments, the multifunctional antibody molecule comprises an anti-TRBC1 VH of SEQ ID NO: 7351 (or a sequence having at least 85%, 90%, 95%, or 99% identity thereto), an anti-TRBC1 VL of SEQ ID NO: 258 (or a sequence having at least 85%, 90%, 95%, or 99% identity thereto), an anti-NKp30 VH of SEQ ID NO: 7302 (or a sequence having at least 85%, 90%, 95%, or 99% identity thereto), and an anti-NKp30 VL of SEQ ID NO: 7309 (or a sequence having at least 85%, 90%, 95%, or 99% identity thereto). In some embodiments, the anti-TRBC1/NKp30 antibody molecule comprises an anti-TRBC1 VH of SEQ ID NO: 7351 (or a sequence having at least 85%, 90%, 95%, or 99% identity thereto), an anti-TRBC1 VL of SEQ ID NO: 258 (or a sequence having at least 85%, 90%, 95%, or 99% identity thereto), and an anti-NKp30 scFv of SEQ ID NO: 7311 (or a sequence having at least 85%, 90%, 95%, or 99% identity thereto). In some embodiments, the anti-TRBC1/NKp30 antibody molecule comprises SEQ ID NOs: 7382, 7380, and 7383 (or a sequence having at least 85%, 90%, 95%, or 99% identity thereto).

[0329] In some embodiments, the multifunctional antibody molecule comprises an anti-TRBC1 VH of SEQ ID NO: 253 (or a sequence having at least 85%, 90%, 95%, or 99% identity thereto), an anti-TRBC1 VL of SEQ ID NO: 258 (or a sequence having at least 85%, 90%, 95%, or 99% identity thereto), an anti-NKp30 VH of SEQ ID NO: 7302 (or a sequence having at least 85%, 90%, 95%, or 99% identity thereto), and an anti-NKp30 VL of SEQ ID NO: 7309 (or a sequence having at least 85%, 90%, 95%, or 99% identity thereto). In some embodiments, the anti-TRBC1/NKp30 antibody molecule comprises an anti-TRBC1 VH of SEQ ID NO: 253 (or a sequence having at least 85%, 90%, 95%, or 99% identity thereto), an anti-TRBC1 VL of SEQ ID NO: 258 (or a sequence having at least 85%, 90%, 95%, or 99% identity thereto), and an anti-NKp30 scFv of SEQ ID NO: 7311 (or a sequence having at least 85%, 90%, 95%, or 99% identity thereto). In some embodiments, the anti-TRBC1/NKp30 antibody molecule comprises SEQ ID NOs: 7379, 7380, and 7383 (or a sequence having at least 85%, 90%, 95%, or 99% identity thereto).

[0330] In some embodiments, the multifunctional antibody molecule comprises an anti-TRBC1 VH of SEQ ID NO: 7351 (or a sequence having at least 85%, 90%, 95%, or 99% identity thereto), an anti-TRBC1 VL of SEQ ID NO: 258 (or a sequence having at least 85%, 90%, 95%, or 99% identity thereto), an anti-NKp30 VH of SEQ ID NO: 7302 (or a sequence having at least 85%, 90%, 95%, or 99% identity thereto), and an anti-NKp30 VL of SEQ ID NO: 7305 (or a sequence having at least 85%, 90%, 95%, or 99% identity thereto). In some embodiments, the anti-TRBC1/NKp30 antibody molecule comprises an anti-TRBC1 VH of SEQ ID NO: 7351 (or a sequence having at least 85%, 90%, 95%, or 99% identity thereto), an anti-TRBC1 VL of SEQ ID NO: 258 (or a sequence having at least 85%, 90%, 95%, or 99% identity thereto), and an anti-NKp30 scFv of SEQ ID NO: 7310 (or a sequence having at least 85%, 90%, 95%, or 99% identity thereto). In some embodiments, the anti-TRBC1/NKp30 antibody molecule comprises SEQ ID NOs: 7382, 7380, and 7384 (or a sequence having at least 85%, 90%, 95%, or 99% identity thereto).

[0331] In some embodiments, the multifunctional antibody molecule comprises an anti-TRBC1 VH of SEQ ID NO: 253 (or a sequence having at least 85%, 90%, 95%, or 99% identity thereto), an anti-TRBC1 VL of SEQ ID NO: 258 (or a sequence having at least 85%, 90%, 95%, or 99% identity thereto), an anti-NKp30 VH of SEQ ID NO: 7302 (or a sequence having at least 85%, 90%, 95%, or 99% identity thereto), and an anti-NKp30 VL of SEQ ID NO: 7305 (or a sequence having at least 85%, 90%, 95%, or 99% identity thereto). In some embodiments, the anti-TRBC1/NKp30 antibody molecule comprises an anti-TRBC1 VH of SEQ ID NO: 253 (or a sequence having at least 85%, 90%, 95%, or 99% identity thereto), an anti-TRBC1 VL of SEQ ID NO: 258 (or a sequence having at least 85%, 90%, 95%, or 99% identity thereto), and an anti-NKp30 scFv of SEQ ID NO: 7310 (or a sequence having at least 85%, 90%, 95%, or 99% identity thereto). In some embodiments, the anti-TRBC1/NKp30 antibody molecule comprises SEQ ID NOs: 7379, 7380, and 7384 (or a sequence having at least 85%, 90%, 95%, or 99% identity thereto).

TABLE 19
Exemplary antibody molecules that bind to TRBC1 and NKp30

| SEQ ID | | |
|---|---|---|
| NO | Description | Sequence |
| BJM0772 | | |
| SEQ ID | anti- | QVQLVQSGAEVKKPGSSVKVSCKASGYTFTGYVMHWVRQAPG |
| NO: 7379 | TRBC1 | QGLEWMGFINPYNDDIQSNERFRGRVTITSDKSTTTAYMELSSL |
| | HC | RSEDTAVYYCARGAGYNFDGAYRFFDFWGQGTLVTVSSASTK |
| | | GPSVFPLAPSSKSTSGGTAALGCLVKDYFPEPVTVSWNSGALTS |
| | | GVHTFPAVLQSSGLYSLSSVVTVPSSSLGTQTYICNVNHKPSNTK |
| | | VDKRVEPKSCDKTHTCPPCPAPELLGGPSVFLFPPKPKDTLMISR |
| | | TPEVTCVVVDVSHEDPEVKFNWYVDGVEVHNAKTKPREEQYA |
| | | STYRVVSVLTVLHQDWLNGKEYKCKVSNKALPAPIEKTISKAK |
| | | GQPREPQVYTLPPCREEMTKNQVSLWCLVKGFYPSDIAVEWES |
| | | NGQPENNYKTTPPVLDSDGSFFLYSKLTVDKSRWQQGNVFSCS |
| | | VMHEALHNHYTQKSLSLSPGK |
| SEQ ID | anti- | DVVMTQSPLSLPVTLGQPASISCRSSQRLVHSNGNTYLHWYQQ |
| NO: 7380 | TRBC1 LC | RPGQSPRLLIYRVSNRFPGVPDRFSGSGSGTDFTLKISRVEAEDV |
| | | GVYFCSQSTHVPYTFGGGTKVEIKRTVAAPSVFIFPPSDEQLKSG |
| | | TASVVCLLNNFYPREAKVQWKVDNALQSGNSQESVTEQDSKDS |
| | | TYSLSSTLTLSKADYEKHKVYACEVTHQGLSSPVTKSFNRGEC |
| SEQ ID | anti- | QIQLQESGPGLVKPSQSLSLSCSVTGFSITTTGYHWNWIRQFPGK |
| NO: 7381 | NKp30 | KLEWMGYIYSSGSTSYNPSLKSRFSITRDTSKNQFFLQLNSVTTE |
| | 15E1 scFv- | DTATYYCARGDWHYFDYWGPGTMVTVSSGGGGSGGGGSGGG |
| | Fc | GSGGGGSSFTLTQPPLVSVAVGQVATITCSGEKLSDKYVHWYQ |
| | | QKPGRAPVMVIYENDRRPSGIPDQFSGSNSGNIASLTISKAQAGD |
| | | EADYFCQFWDSTNSAVFGGGTQLTVLDKTHTCPPCPAPELLGGP |
| | | SVFLFPPKPKDTLMISRTPEVTCVVVDVSHEDPEVKFNWYVDGV |
| | | EVHNAKTKPREEQYASTYRVVSVLTVLHQDWLNGKEYKCKVS |
| | | NKALPAPIEKTISKAKGQPREPQVCTLPPSREEMTKNQVSLSCAV |
| | | KGFYPSDIAVEWESNGQPENNYKTTPPVLDSDGSFFLVSKLTVD |
| | | KSRWQQGNVFSCSVMHEALHNRFTQKSLSLSPGK |
| BJM1042 | | |
| SEQ ID | anti- | QVQLVQSGAEVKKPGSSVKVSCKASGYTFTGYVMHWVRQAPG |
| NO: 7382 | TRBC1 | QGLEWMGFIIPIFGTANYAQKFQGRVTITSDKSTTTAYMELSSLR |
| | HC | SEDTAVYYCARGAGYNFDGAYRFFDFWGQGTLVTVSSASTKGP |
| | | SVFPLAPSSKSTSGGTAALGCLVKDYFPEPVTVSWNSGALTSGV |
| | | HTFPAVLQSSGLYSLSSVVTVPSSSLGTQTYICNVNHKPSNTKVD |
| | | KRVEPKSCDKTHTCPPCPAPELLGGPSVFLFPPKPKDTLMISRTP |
| | | EVTCVVVDVSHEDPEVKFNWYVDGVEVHNAKTKPREEQYAST |
| | | YRVVSVLTVLHQDWLNGKEYKCKVSNKALPAPIEKTISKAKGQ |
| | | PREPQVYTLPPCREEMTKNQVSLWCLVKGFYPSDIAVEWESNG |
| | | QPENNYKTTPPVLDSDGSFFLYSKLTVDKSRWQQGNVFSCSVM |
| | | HEALHNHYTQKSLSLSPGK |
| SEQ ID | anti- | DVVMTQSPLSLPVTLGQPASISCRSSQRLVHSNGNTYLHWYQQ |
| NO: 7380 | TRBC1 LC | RPGQSPRLLIYRVSNRFPGVPDRFSGSGSGTDFTLKISRVEAEDV |
| | | GVYFCSQSTHVPYTFGGGTKVEIKRTVAAPSVFIFPPSDEQLKSG |
| | | TASVVCLLNNFYPREAKVQWKVDNALQSGNSQESVTEQDSKDS |
| | | TYSLSSTLTLSKADYEKHKVYACEVTHQGLSSPVTKSFNRGEC |
| SEQ ID | anti- | EIQLLESGGGLVQPGGSLRLSCAVSGFSITTTGYHWNWVRQAPG |
| NO: 7383 | NKp30 | KGLEWVGYIYSSGSTSYNPSLKSRFTISRDTSKNTFYLQMNSLRA |
| | humanized | EDTAVYYCARGDWHYFDYWGQGTMVTVSSGGGGSGGGGSGG |
| | 15E1 scFv- | GGSGGGGSDSVTTQSPLSLPVTLGQPASISCSGEKLSDKYVHWY |
| | Fc | QQRPGQSPRMLIYENDRRPSGVPDRFSGSNSGNDATLKISRVEA |
| | | EDVGVYFCQFWDSTNSAVFGGGTKVEIKDKTHTCPPCPAPELLG |
| | | GPSVFLFPPKPKDTLMISRTPEVTCVVVDVSHEDPEVKFNWYVD |
| | | GVEVHNAKTKPREEQYASTYRVVSVLTVLHQDWLNGKEYKCK |
| | | VSNKALPAPIEKTISKAKGQPREPQVCTLPPSREEMTKNQVSLSC |
| | | AVKGFYPSDIAVEWESNGQPENNYKTTPPVLDSDGSFFLVSKLT |
| | | VDKSRWQQGNVFSCSVMHEALHNHYTQKSLSLSPGK |
| BJM1052 | | |
| SEQ ID | anti- | QVQLVQSGAEVKKPGSSVKVSCKASGYTFTGYVMHWVRQAPG |
| NO: 7379 | TRBC1 | QGLEWMGFINPYNDDIQSNERFRGRVTITSDKSTTTAYMELSSL |
| | HC | RSEDTAVYYCARGAGYNFDGAYRFFDFWGQGTLVTVSSASTK |
| | | GPSVFPLAPSSKSTSGGTAALGCLVKDYFPEPVTVSWNSGALTS |
| | | GVHTFPAVLQSSGLYSLSSVVTVPSSSLGTQTYICNVNHKPSNTK |
| | | VDKRVEPKSCDKTHTCPPCPAPELLGGPSVFLFPPKPKDTLMISR |
| | | TPEVTCVVVDVSHEDPEVKFNWYVDGVEVHNAKTKPREEQYA |
| | | STYRVVSVLTVLHQDWLNGKEYKCKVSNKALPAPIEKTISKAK |
| | | GQPREPQVYTLPPCREEMTKNQVSLWCLVKGFYPSDIAVEWES |
| | | NGQPENNYKTTPPVLDSDGSFFLYSKLTVDKSRWQQGNVFSCS |
| | | VMHEALHNHYTQKSLSLSPGK |
| SEQ ID | anti- | DVVMTQSPLSLPVTLGQPASISCRSSQRLVHSNGNTYLHWYQQ |
| NO: 7380 | TRBC1 LC | RPGQSPRLLIYRVSNRFPGVPDRFSGSGSGTDFTLKISRVEAEDV |
| | | GVYFCSQSTHVPYTFGGGTKVEIKRTVAAPSVFIFPPSDEQLKSG |
| | | TASVVCLLNNFYPREAKVQWKVDNALQSGNSQESVTEQDSKDS |
| | | TYSLSSTLTLSKADYEKHKVYACEVTHQGLSSPVTKSFNRGEC |
| SEQ ID | anti- | EIQLLESGGGLVQPGGSLRLSCAVSGFSITTTGYHWNWVRQAPG |
| NO: 7383 | NKp30 | KGLEWVGYIYSSGSTSYNPSLKSRFTISRDTSKNTFYLQMNSLRA |
| | humanized | EDTAVYYCARGDWHYFDYWGQGTMVTVSSGGGGSGGGGSGG |
| | 15E1 scFv- | GGSGGGGSDSVTTQSPLSLPVTLGQPASISCSGEKLSDKYVHWY |
| | Fc | QQRPGQSPRMLIYENDRRPSGVPDRFSGSNSGNDATLKISRVEA |
| | | EDVGVYFCQFWDSTNSAVFGGGTKVEIKDKTHTCPPCPAPELLG |
| | | GPSVFLFPPKPKDTLMISRTPEVTCVVVDVSHEDPEVKFNWYVD |
| | | GVEVHNAKTKPREEQYASTYRVVSVLTVLHQDWLNGKEYKCK |
| | | VSNKALPAPIEKTISKAKGQPREPQVCTLPPSREEMTKNQVSLSC |
| | | AVKGFYPSDIA VEWESNGQPENNYKTTPPVLDSDGSFFLVSKLT |
| | | VDKSRWQQGNVFSCSVMHEALHNHYTQKSLSLSPGK |
| BJM1038 | | |
| SEQ ID | anti- | QVQLVQSGAEVKKPGSSVKVSCKASGYTFTGYVMHWVRQAPG |
| NO: 7382 | TRBC1 | QGLEWMGFIIPIFGTANYAQKFQGRVTITSDKSTTTAYMELSSLR |
| | HC | SEDTAVYYCARGAGYNFDGAYRFFDFWGQGTLVTVSSASTKGP |
| | | SVFPLAPSSKSTSGGTAALGCLVKDYFPEPVTVSWNSGALTSGV |
| | | HTFPAVLQSSGLYSLSSVVTVPSSSLGTQTYICNVNHKPSNTKVD |
| | | KRVEPKSCDKTHTCPPCPAPELLGGPSVFLFPPKPKDTLMISRTP |
| | | EVTCVVVDVSHEDPEVKFNWYVDGVEVHNAKTKPREEQYAST |
| | | YRVVSVLTVLHQDWLNGKEYKCKVSNKALPAPIEKTISKAKGQ |
| | | PREPQVYTLPPCREEMTKNQVSLWCLVKGFYPSDIAVEWESNG |
| | | QPENNYKTTPPVLDSDGSFFLYSKLTVDKSRWQQGNVFSCSVM |
| | | HEALHNHYTQKSLSLSPGK |
| SEQ ID | anti- | DVVMTQSPLSLPVTLGQPASISCRSSQRLVHSNGNTYLHWYQQ |
| NO: 7380 | TRBC1 LC | RPGQSPRLLIYRVSNRFPGVPDRFSGSGSGTDFTLKISRVEAEDV |
| | | GVYFCSQSTHVPYTFGGGTKVEIKRTVAAPSVFIFPPSDEQLKSG |
| | | TASVVCLLNNFYPREAKVQWKVDNALQSGNSQESVTEQDSKDS |
| | | TYSLSSTLTLSKADYEKHKVYACEVTHQGLSSPVTKSFNRGEC |
| SEQ ID | anti- | EIQLLESGGGLVQPGGSLRLSCAVSGFSITTTGYHWNWVRQAPG |
| NO: 7384 | NKp30 | KGLEWVGYIYSSGSTSYNPSLKSRFTISRDTSKNTFYLQMNSLRA |
| | humanized | EDTAVYYCARGDWHYFDYWGQGTMVTVSSGGGGSGGGGSGG |
| | 15E1 scFv- | GGSGGGGSSSETTQPPSVSVSPGQTASITCSGEKLSDKYVHWYQ |
| | Fc | QKPGQSPVMVIYENDRRPSGIPERFSGSNSGNTATLTISGTQAMD |
| | | EADYFCQFWDSTNSAVFGGGTQLTVLDKTHTCPPCPAPELLGGP |
| | | SVFLFPPKPKDTLMISRTPEVTCVVVDVSHEDPEVKFNWYVDGV |
| | | EVHNAKTKPREEQYASTYRVVSVLTVLHQDWLNGKEYKCKVS |
| | | NKALPAPIEKTISKAKGQPREPQVCTLPPSREEMTKNQVSLSCAV |
| | | KGFYPSDIAVEWESNGQPENNYKTTPPVLDSDGSFFLVSKLTVD |
| | | KSRWQQGNVFSCSVMHEALHNHYTQKSLSLSPGK |
| BJM1048 | | |
| SEQ ID | anti- | QVQLVQSGAEVKKPGSSVKVSCKASGYTFTGYVMHWVRQAPG |
| NO: 7379 | TRBC1 | QGLEWMGFINPYNDDIQSNERFRGRVTITSDKSTTTAYMELSSL |
| | HC | RSEDTAVYYCARGAGYNFDGAYRFFDFWGQGTLVTVSSASTK |
| | | GPSVFPLAPSSKSTSGGTAALGCLVKDYFPEPVTVSWNSGALTS |
| | | GVHTFPAVLQSSGLYSLSSVVTVPSSSLGTQTYICNVNHKPSNTK |
| | | VDKRVEPKSCDKTHTCPPCPAPELLGGPSVFLFPPKPKDTLMISR |
| | | TPEVTCVVVDVSHEDPEVKFNWYVDGVEVHNAKTKPREEQYA |
| | | STYRVVSVLTVLHQDWLNGKEYKCKVSNKALPAPIEKTISKAK |
| | | GQPREPQVYTLPPCREEMTKNQVSLWCLVKGFYPSDIAVEWES |
| | | NGQPENNYKTTPPVLDSDGSFFLYSKLTVDKSRWQQGNVFSCS |
| | | VMHEALHNHYTQKSLSLSPGK |
| SEQ ID | anti- | DVVMTQSPLSLPVTLGQPASISCRSSQRLVHSNGNTYLHWYQQ |
| NO: 7380 | TRBC1 LC | RPGQSPRLLIYRVSNRFPGVPDRFSGSGSGTDFTLKISRVEAEDV |
| | | GVYFCSQSTHVPYTFGGGTKVEIKRTVAAPSVFIFPPSDEQLKSG |
| | | TASVVCLLNNFYPREAKVQWKVDNALQSGNSQESVTEQDSKDS |
| | | TYSLSSTLTLSKADYEKHKVYACEVTHQGLSSPVTKSFNRGEC |
| SEQ ID | anti- | EIQLLESGGGLVQPGGSLRLSCAVSGFSITTTGYHWNWVRQAPG |
| NO: 7384 | NKp30 | KGLEWVGYIYSSGSTSYNPSLKSRFTISRDTSKNTFYLQMNSLRA |
| | humanized | EDTAVYYCARGDWHYFDYWGQGTMVTVSSGGGGSGGGGSGG |
| | 15E1 scFv- | GGSGGGGSSSETTQPPSVSVSPGQTASITCSGEKLSDKYVHWYQ |
| | Fc | QKPGQSPVMVIYENDRRPSGIPERFSGSNSGNTATLTISGTQAMD |
| | | EADYFCQFWDSTNSAVFGGGTQLTVLDKTHTCPPCPAPELLGGP |
| | | SVFLFPPKPKDTLMISRTPEVTCVVVDVSHEDPEVKFNWYVDGV |
| | | EVHNAKTKPREEQYASTYRVVSVLTVLHQDWLNGKEYKCKVS |
| | | NKALPAPIEKTISKAKGQPREPQVCTLPPSREEMTKNQVSLSCAV |
| | | KGFYPSDIAVEWESNGQPENNYKTTPPVLDSDGSFFLVSKLTVD |
| | | KSRWQQGNVFSCSVMHEALHNHYTQKSLSLSPGK |

[0332] In some embodiments, the disclosure features a multifunctional antibody molecule that binds to TRBC2 and NKp30. In some embodiments, the multifunctional antibody molecule comprises a configuration shown in any of FIGS. 30A-30D. In some embodiments, the multifunctional antibody molecule comprises an anti-TRBC2 Fab. In some embodiments, the multifunctional antibody molecule comprises an anti-TRBC2 scFv. In some embodiments, the multifunctional antibody molecule comprises an anti-NKp30 Fab. In some embodiments, the multifunctional antibody molecule comprises an anti-NKp30 scFv. In some embodiments, the multifunctional antibody molecule comprises an anti-TRBC2 Fab and an anti-NKp30 scFv, e.g., comprises a configuration shown in FIG. 30A. In some embodiments, the multifunctional antibody molecule comprises an anti-TRBC2 Fab and an anti-NKp30 Fab, e.g., comprises a configuration shown in FIG. 30B. In some embodiments, the multifunctional antibody molecule comprises an anti-NKp30 Fab and an anti-TRBC2 scFv, e.g., comprises a configuration shown in FIG. 30C. In some embodiments, the multifunctional antibody molecule comprises an anti-TRBC2 scFv and an anti-NKp30 scFv, e.g., comprises a configuration shown in FIG. 30D. In some embodiments, the multifunctional antibody molecule comprises an anti-TRBC2 antigen binding domain disclosed herein, e.g., an anti-TRBC2 antigen binding domain disclosed in Tables 21-24. In some embodiments, the multifunctional antibody molecule comprises an anti-NKp30 antigen binding domain disclosed herein, e.g., an anti-NKp30 antigen binding domain disclosed in Tables 7, 8, 8A, 8B, 9, 10 and 18.

[0333] In some embodiments, exemplary multifunctional antibody molecules that bind to TRBC2 and NKp30 are disclosed in Table 25.

[0334] In some embodiments, the multifunctional antibody molecule comprises an anti-TRBC2 VH of SEQ ID NO: 7420 (or a sequence having at least 85%, 90%, 95%, or 99% identity thereto), an anti-TRBC2 VL of SEQ ID NO: 7419 (or a sequence having at least 85%, 90%, 95%, or 99% identity thereto), an anti-NKp30 VH of SEQ ID NO: 7302 (or a sequence having at least 85%, 90%, 95%, or 99% identity thereto), and an anti-NKp30 VL of SEQ ID NO: 7309 (or a sequence having at least 85%, 90%, 95%, or 99% identity thereto). In some embodiments, the anti-TRBC2/NKp30 antibody molecule comprises an anti-TRBC2 VH of SEQ ID NO: 7420 (or a sequence having at least 85%, 90%, 95%, or 99% identity thereto), an anti-TRBC2 VL of SEQ ID NO: 7419 (or a sequence having at least 85%, 90%, 95%, or 99% identity thereto), and an anti-NKp30 scFv of SEQ ID NO: 7311 (or a sequence having at least 85%, 90%, 95%, or 99% identity thereto). In some embodiments, the anti-TRBC2/NKp30 antibody molecule comprises SEQ ID NOs: 7438, 74-9, and 7383 (or a sequence having at least 85%, 90%, 95%, or 99% identity thereto).

[0335] In some embodiments, the multifunctional antibody molecule comprises an anti-TRBC2 VH of SEQ ID NO: 7423 (or a sequence having at least 85%, 90%, 95%, or 99% identity thereto), an anti-TRBC2 VL of SEQ ID NO: 7419 (or a sequence having at least 85%, 90%, 95%, or 99% identity thereto), an anti-NKp30 VH of SEQ ID NO: 7302 (or a sequence having at least 85%, 90%, 95%, or 99% identity thereto), and an anti-NKp30 VL of SEQ ID NO: 7309 (or a sequence having at least 85%, 90%, 95%, or 99% identity thereto). In some embodiments, the anti-TRBC2/NKp30 antibody molecule comprises an anti-TRBC2 VH of SEQ ID NO: 7423 (or a sequence having at least 85%, 90%, 95%, or 99% identity thereto), an anti-TRBC2 VL of SEQ ID NO: 7419 (or a sequence having at least 85%, 90%, 95%, or 99% identity thereto), and an anti-NKp30 scFv of SEQ ID NO: 7311 (or a sequence having at least 85%, 90%, 95%, or 99% identity thereto). In some embodiments, the anti-TRBC2/NKp30 antibody molecule comprises SEQ ID NOs: 7440, 7439, and 7383 (or a sequence having at least 85%, 90%, 95%, or 99% identity thereto).

[0336] In some embodiments, the multifunctional antibody molecule comprises an anti-TRBC2 VH of SEQ ID NO: 7420 (or a sequence having at least 85%, 90%, 95%, or 99% identity thereto), an anti-TRBC2 VL of SEQ ID NO: 7419 (or a sequence having at least 85%, 90%, 95%, or 99% identity thereto), an anti-NKp30 VH of SEQ ID NO: 7302 (or a sequence having at least 85%, 90%, 95%, or 99% identity thereto), and an anti-NKp30 VL of SEQ ID NO: 7305 (or a sequence having at least 85%, 90%, 95%, or 99% identity thereto). In some embodiments, the anti-TRBC2/NKp30 antibody molecule comprises an anti-TRBC2 VH of SEQ ID NO: 7420 (or a sequence having at least 85%, 90%, 95%, or 99% identity thereto), an anti-TRBC2 VL of SEQ ID NO: 7419 (or a sequence having at least 85%, 90%, 95%, or 99% identity thereto), and an anti-NKp30 scFv of SEQ ID NO: 7310 (or a sequence having at least 85%, 90%, 95%, or 99% identity thereto). In some embodiments, the anti-TRBC2/NKp30 antibody molecule comprises SEQ ID NOs: 7438, 7439, and 7384 (or a sequence having at least 85%, 90%, 95%, or 99% identity thereto).

[0337] In some embodiments, the multifunctional antibody molecule comprises an anti-TRBC2 VH of SEQ ID NO: 7423 (or a sequence having at least 85%, 90%, 95%, or 99% identity thereto), an anti-TRBC2 VL of SEQ ID NO: 7419 (or a sequence having at least 85%, 90%, 95%, or 99% identity thereto), an anti-NKp30 VH of SEQ ID NO: 7302 (or a sequence having at least 85%, 90%, 95%, or 99% identity thereto), and an anti-NKp30 VL of SEQ ID NO: 7305 (or a sequence having at least 85%, 90%, 95%, or 99% identity thereto). In some embodiments, the anti-TRBC2/NKp30 antibody molecule comprises an anti-TRBC2 VH of SEQ ID NO: 7423 (or a sequence having at least 85%, 90%, 95%, or 99% identity thereto), an anti-TRBC2 VL of SEQ ID NO: 7419 (or a sequence having at least 85%, 90%, 95%, or 99% identity thereto), and an anti-NKp30 scFv of SEQ ID NO: 7310 (or a sequence having at least 85%, 90%, 95%, or 99% identity thereto). In some embodiments, the anti-TRBC2/NKp30 antibody molecule comprises SEQ ID NOs: 7440, 7439, and 7384 (or a sequence having at least 85%, 90%, 95%, or 99% identity thereto).

TABLE 25
Exemplary antibody molecules that bind to TRBC2 and NKp30

| SEQ ID | | |
|---|---|---|
| NC | Description | Sequence |
| BKM0097 | | |
| SEQ ID | Anti- | QVQLVQSGAEVKKPGASVKVSCKASTSGFHGYPMHWVRQAP |
| NO: 7438 | TRBC2 | GQGLEWMGFINPYNDDIQSNERFRGRVTMTSDKSTTTAYMELS |
| | HC | SLRSEDTAVYYCARGNGKWGDGAYRFFDFWGQGTLVTVSSAS |
| | | TKGPSVFPLAPSSKSTSGGTAALGCLVKDYFPEPVTVSWNSGA |
| | | LTSGVHTFPAVLQSSGLYSLSSVVTVPSSSLGTQTYICNVNHKP |
| | | SNTKVDKRVEPKSCDKTHTCPPCPAPELLGGPSVFLFPPKPKDT |
| | | LMISRTPEVTCVVVDVSHEDPEVKFNWYVDGVEVHNAKTKPR |
| | | EEQYASTYRVVSVLTVLHQDWLNGKEYKCKVSNKALPAPIEK |
| | | TISKAKGQPREPQVYTLPPCREEMTKNQVSLWCLVKGFYPSDI |
| | | AVEWESNGQPENNYKTTPPVLDSDGSFFLYSKLTVDKSRWQQ |
| | | GNVFSCSVMHEALHNHYTQKSLSLSPGK |
| SEQ ID | Anti- | DVVMTQSPLSLPVTPGEPASISCRSSQNLVHSNGRTYLQWYLQ |
| NO: 7439 | TRBC2 LC | KPGQSPQLLIYRVSNRFPGVPDRFSGSGSGTDFTLKISRVEAEDV |
| | | GVYFCSQSTHVPYTFGGGTKVEIKRTVAAPSVFIFPPSDEQLKS |
| | | GTASVVCLLNNFYPREAKVQWKVDNALQSGNSQESVTEQDSK |
| | | DSTYSLSSTLTLSKADYEKHKVYACEVTHQGLSSPVTKSFNRG |
| | | EC |
| SEQ ID | anti- | EIQLLESGGGLVQPGGSLRLSCAVSGFSITTTGYHWNWVRQAP |
| NO: 7383 | NKp30 | GKGLEWVGYIYSSGSTSYNPSLKSRFTISRDTSKNTFYLQMNSL |
| | humanized | RAEDTAVYYCARGDWHYFDYWGQGTMVTVSSGGGGSGGGG |
| | 15E1 scFv- | SGGGGSGGGGSDSVTTQSPLSLPVTLGQPASISCSGEKLSDKYV |
| | Fc | HWYQQRPGQSPRMLIYENDRRPSGVPDRFSGSNSGNDATLKIS |
| | | RVEAEDVGVYFCQFWDSTNSAVFGGGTKVEIKDKTHTCPPCPA |
| | | PELLGGPSVFLFPPKPKDTLMISRTPEVTCVVVDVSHEDPEVKF |
| | | NWYVDGVEVHNAKTKPREEQYASTYRVVSVLTVLHQDWLNG |
| | | KEYKCKVSNKALPAPIEKTISKAKGQPREPQVCTLPPSREEMTK |
| | | NQVSLSCAVKGFYPSDIAVEWESNGQPENNYKTTPPVLDSDGS |
| | | FFLVSKLTVDKSRWQQGNVFSCSVMHEALHNHYTQKSLSLSP |
| | | GK |
| BKM0098 | | |
| SEQ ID | Anti- | QVQLVQSGAEVKKPGASVKVSCKASPRGFHGYHMHWVRQAP |
| NO: 7440 | TRBC2 | GQGLEWMGFINPYNDDIQSNERFRGRVTMTSDKSTTTAYMELS |
| | HC | SLRSEDTAVYYCARGNGKWGDGAYRFFDFWGQGTLVTVSSAS |
| | | TKGPSVFPLAPSSKSTSGGTAALGCLVKDYFPEPVTVSWNSGA |
| | | LTSGVHTFPAVLQSSGLYSLSSVVTVPSSSLGTQTYICNVNHKP |
| | | SNTKVDKRVEPKSCDKTHTCPPCPAPELLGGPSVFLFPPKPKDT |
| | | LMISRTPEVTCVVVDVSHEDPEVKFNWYVDGVEVHNAKTKPR |
| | | EEQYASTYRVVSVLTVLHQDWLNGKEYKCKVSNKALPAPIEK |
| | | TISKAKGQPREPQVYTLPPCREEMTKNQVSLWCLVKGFYPSDI |
| | | AVEWESNGQPENNYKTTPPVLDSDGSFFLYSKLTVDKSRWQQ |
| | | GNVFSCSVMHEALHNHYTQKSLSLSPGK |
| SEQ ID | Anti- | DVVMTQSPLSLPVTPGEPASISCRSSQNLVHSNGRTYLQWYLQ |
| NO: 7439 | TRBC2 LC | KPGQSPQLLIYRVSNRFPGVPDRFSGSGSGTDFTLKISRVEAEDV |
| | | GVYFCSQSTHVPYTFGGGTKVEIKRTVAAPSVFIFPPSDEQLKS |
| | | GTASVVCLLNNFYPREAKVQWKVDNALQSGNSQESVTEQDSK |
| | | DSTYSLSSTLTLSKADYEKHKVYACEVTHQGLSSPVTKSFNRG |
| | | EC |
| SEQ ID | anti- | EIQLLESGGGLVQPGGSLRLSCAVSGFSITTTGYHWNWVRQAP |
| NO: 7383 | NKp30 | GKGLEWVGYIYSSGSTSYNPSLKSRFTISRDTSKNTFYLQMNSL |
| | humanized | RAEDTAVYYCARGDWHYFDYWGQGTMVTVSSGGGGSGGGG |
| | 15E1 scFv- | SGGGGSGGGGSDSVTTQSPLSLPVTLGQPASISCSGEKLSDKYV |
| | Fc | HWYQQRPGQSPRMLIYENDRRPSGVPDRFSGSNSGNDATLKIS |
| | | RVEAEDVGVYFCQFWDSTNSAVFGGGTKVEIKDKTHTCPPCPA |
| | | PELLGGPSVFLFPPKPKDTLMISRTPEVTCVVVDVSHEDPEVKF |
| | | NWYVDGVEVHNAKTKPREEQYASTYRVVSVLTVLHQDWLNG |
| | | KEYKCKVSNKALPAPIEKTISKAKGQPREPQVCTLPPSREEMTK |
| | | NQVSLSCAVKGFYPSDIAVEWESNGQPENNYKTTPPVLDSDGS |
| | | FFLVSKLTVDKSRWQQGNVFSCSVMHEALHNHYTQKSLSLSP |
| | | GK |

### Multifunctional Antibody Effector Function and Fc Variants

[0338] In some embodiments, the multifunctional molecule (e.g., an anti-TRBC1/NKp30 antibody molecule or an anti-TRBC2/NKp30 antibody molecule) disclosed herein comprises an Fc region, e.g., as described herein. In some embodiments, the Fc region is a wildtype Fc region, e.g., a wildtype human Fc region. In some embodiments, the Fc region comprises a variant, e.g., an Fc region comprising an addition, substitution, or deletion of at least one amino acid residue in the Fc region which results in, e.g., reduced or ablated affinity for at least one Fc receptor.

[0339] The Fc region of an antibody interacts with a number of receptors or ligands including Fc Receptors (e.g., FcγRI, FcγRIIA, FcγRIIIA), the complement protein CIq, and other molecules such as proteins A and G. These interactions are essential for a variety of effector functions and downstream signaling events including: antibody dependent cell-mediated cytotoxicity (ADCC), Antibody-dependent cellular phagocytosis (ADCP) and complement dependent cytotoxicity (CDC).

[0340] In some embodiments, the multifunctional molecule (e.g., an anti-TRBC1/NKp30 antibody molecule or an anti-TRBC2/NKp30 antibody molecule) comprising a variant Fc region has reduced, e.g., ablated, affinity for an Fc receptor, e.g., an Fc receptor described herein. In some embodiments, the reduced affinity is compared to an otherwise similar antibody with a wildtype Fc region.

[0341] In some embodiments, the multifunctional molecule (e.g., an anti-TRBC1/NKp30 antibody molecule or an anti-TRBC2/NKp30 antibody molecule) comprising a variant Fc region has one or more of the following properties: (1) reduced effector function (e.g., reduced ADCC, ADCP and/or CDC); (2) reduced binding to one or more Fc receptors; and/or (3) reduced binding to C1q complement. In some embodiments, the reduction in any one, or all of properties (1)-(3) is compared to an otherwise similar antibody with a wildtype Fc region.

[0342] In some embodiments, the multifunctional molecule (e.g., an anti-TRBC1/NKp30 antibody molecule or an anti-TRBC2/NKp30 antibody molecule) comprising a variant Fc region has reduced affinity to a human Fc receptor, e.g., FcγR I, FcγR II and/or FcγR III. In some embodiments, the multifunctional molecule (e.g., an anti-TRBC1/NKp30 antibody molecule or an anti-TRBC2/NKp30 antibody molecule) comprising a variant Fc region comprises a human IgG1 region or a human IgG4 region.

[0343] Exemplary Fc region variants are provided in Table 20 and also disclosed in Saunders O, (2019) Frontiers in Immunology; vol 10, article 1296, the entire contents of which is hereby incorporated by reference.

[0344] In some embodiments, the multifunctional molecule (e.g., an anti-TRBC1/NKp30 antibody molecule or an anti-TRBC2/NKp30 antibody molecule) comprises any one or all, or any combination of Fc region variants, e.g., mutations, disclosed in Table 20. In some embodiments, the multifunctional molecule (e.g., an anti-TRBC1/NKp30 antibody molecule or an anti-TRBC2/NKp30 antibody molecule) comprises an Asn297Ala (N297A) mutation. In some embodiments, the multifunctional molecule (e.g., an anti-TRBC1/NKp30 antibody molecule or an anti-TRBC2/NKp30 antibody molecule) comprises a Leu234Ala/Leu235Ala (LALA) mutation.

TABLE 20
Exemplary Fc modifications

| Modification or mutation | Altered effector function |
|---|---|
| Leu235Glu | ADCC; |
| Leu234Ala/Leu235Ala (LALA) | ADCC; ADCP; CDC |
| Ser228Pro/Leu235Glu | |
| Leu234Ala/Leu235Ala/Pro329Gly | ADCP |
| Pro331Ser/Leu234Glu/Leu235Phe | CDC |
| Asp265Ala | ADCC, ADCP |
| Gly237Ala | ADCP |
| Glu318Ala | ADCP |
| Glu233Pro | |
| Gly236Arg/Leu328Arg | ADCC |
| His268Gln/Val309Leu/Ala330Ser/Pro331Ser | ADCC; ADCP; CDC |
| Val234Ala/Gly237Ala/Pro238Ser/ | ADCC; ADCP; CDC |
| His268Ala/Val309Leu/Ala330Ser/Pro331Ser | |
| Leu234Ala/L235Ala/Gly237Ala/P238Ser/ | ADCC; CDC |
| His268Ala/Ala330Ser/Pro331Ser | |
| Ala330Leu | CDC |
| Asp270Ala | CDC |
| Lys322Ala | CDC |
| Pro329Ala | CDC |
| Pro331Ala | CDC |
| Val264Ala | CDC |
| High mannose glycosylation | CDC |
| Phe241Ala | CDC |
| Asn297Ala or Gly or Gln | ADCC; ADCP; CDC |
| S228P/Phe234Ala/Leu235Ala | ADCC; CDC |

### Antibody Molecules Targeting TRBC1

[0345] In another aspect, the present disclosure features an antibody molecule, e.g., a monoclonal antibody molecule, or fragment thereof that binds TRBC1.

[0346] In some embodiments, the antibody molecule, or fragment thereof, that binds to TRBC1 comprises one or more CDRs (e.g., VHCDR1, VHCDR2, VHCDR3, VLCDR1, VLCDR2, and/or VLCDR3) disclosed in Table 2, Table 6, or Table 3, or a sequence having at least 85%, 90%, 95%, or 99% identity thereto. In some embodiments, the antibody molecule, or fragment thereof, that binds to TRBC1 comprises one or more framework regions (e.g., VHFWR1, VHFWR2, VHFWR3, VHFWR4, VLFWR1, VLFWR2, VLFWR3, and/or VLFWR4) disclosed in Table 2. Table 6. or Table 3, or a sequence having at least 85%, 90%, 95%, or 99% identity thereto. In some embodiments, the antibody molecule, or fragment thereof, that binds to TRBC1 comprises a VH and/or a VL disclosed in Table 4, or a sequence having at least 85%, 90%, 95%, or 99% identity thereto. In some embodiments, the antibody molecule, or fragment thereof, that binds to TRBC1 comprises an amino acid sequence disclosed in Table 5, or a sequence having at least 85%, 90%, 95%, or 99% identity thereto.

[0347] In some embodiments, the antibody molecule, or fragment thereof, that binds to TRBC1 comprises a VH comprising a heavy chain complementarity determining region 1 (VHCDR1), a VHCDR2, and a VHCDR3, and a VL comprising a light chain complementarity determining region 1 (VLCDR1), a VLCDR2, and a VLCDR3.

[0348] In some embodiments, the VHCDR1, VHCDR2, and VHCDR3 comprise the amino acid sequences of SEQ ID NOs: 7346, 7355, and 202, respectively (or a sequence having at least 85%, 90%, 95%, or 99% identity thereto). In some embodiments, the VHCDR1, VHCDR2, and VHCDR3 comprise the amino acid sequences of SEQ ID NOs: 7346, 201, and 202, respectively (or a sequence having at least 85%, 90%, 95%, or 99% identity thereto). In some embodiments, the VHCDR1, VHCDR2, and VHCDR3 comprise the amino acid sequences of SEQ ID NOs: 7354, 201, and 202, respectively (or a sequence having at least 85%, 90%, 95%, or 99% identity thereto). In some embodiments, the VHCDR1, VHCDR2, and VHCDR3 comprise the amino acid sequences of SEQ ID NOs: 7354, 7355, and 202, respectively (or a sequence having at least 85%, 90%, 95%, or 99% identity thereto).

[0349] In some embodiments, the VLCDR1, VLCDR2, and VLCDR3 comprise the amino acid sequences of SEQ ID NOs: 223, 224, and 225, respectively (or a sequence having at least 85%, 90%, 95%, or 99% identity thereto). In some embodiments, the VLCDR1, VLCDR2, and VLCDR3 comprise the amino acid sequences of SEQ ID NOs: 7367, 224, and 225, respectively (or a sequence having at least 85%, 90%, 95%, or 99% identity thereto). In some embodiments, the VLCDR1, VLCDR2, and VLCDR3 comprise the amino acid sequences of SEQ ID NOs: 223, 7368, and 225, respectively (or a sequence having at least 85%, 90%, 95%, or 99% identity thereto). In some embodiments, the VLCDR1, VLCDR2, and VLCDR3 comprise the amino acid sequences of SEQ ID NOs: 223, 224, and 7369, respectively (or a sequence having at least 85%, 90%, 95%, or 99% identity thereto). In some embodiments, the VLCDR1, VLCDR2, and VLCDR3 comprise the amino acid sequences of SEQ ID NOs: 7367, 7368, and 7369, respectively (or a sequence having at least 85%, 90%, 95%, or 99% identity thereto).

[0350] In some embodiments, the VHCDR1, VHCDR2, VHCDR3, VLCDR1, VLCDR2, and VLCDR3 comprise the amino acid sequences of SEQ ID NOs: 7346, 7355, 202, 223, 224, and 225, respectively (or a sequence having at least 85%, 90%, 95%, or 99% identity thereto). In some embodiments, the VHCDR1, VHCDR2, VHCDR3, VLCDR1, VLCDR2, and VLCDR3 comprise the amino acid sequences of SEQ ID NOs: 7346, 201, 202, 223, 224, and 225, respectively (or a sequence having at least 85%, 90%, 95%, or 99% identity thereto). In some embodiments, the VHCDR1, VHCDR2, VHCDR3, VLCDR1, VLCDR2, and VLCDR3 comprise the amino acid sequences of: SEQ ID NOs: 7346, 7355, 202, 7367, 224, and 225, respectively (or a sequence having at least 85%, 90%, 95%, or 99% identity thereto); SEQ ID NOs: 7346, 7355, 202, 223, 7368, and 225, respectively (or a sequence having at least 85%, 90%, 95%, or 99% identity thereto); SEQ ID NOs: 7346, 7355, 202, 223, 224, and 7369, respectively (or a sequence having at least 85%, 90%, 95%, or 99% identity thereto); SEQ ID NOs: 7346, 7355, 202, 7367, 7368, and 7369, respectively (or a sequence having at least 85%, 90%, 95%, or 99% identity thereto); SEQ ID NOs: 7346, 201, 202, 7367, 224, and 225, respectively (or a sequence having at least 85%, 90%, 95%, or 99% identity thereto); SEQ ID NOs: 7346, 201, 202, 223, 7368, and 225, respectively (or a sequence having at least 85%, 90%, 95%, or 99% identity thereto); SEQ ID NOs: 7346, 201, 202, 223, 224, and 7369, respectively (or a sequence having at least 85%, 90%, 95%, or 99% identity thereto); SEQ ID NOs: 7346, 201, 202, 7367, 7368, and 7369, respectively (or a sequence having at least 85%, 90%, 95%, or 99% identity thereto); SEQ ID NOs: 7354, 201, 202, 223, 224, and 225, respectively (or a sequence having at least 85%, 90%, 95%, or 99% identity thereto); SEQ ID NOs: 7354, 201, 202, 7367, 224, and 225, respectively (or a sequence having at least 85%, 90%, 95%, or 99% identity thereto); SEQ ID NOs: 7354, 201, 202, 223, 7368, and 225, respectively (or a sequence having at least 85%, 90%, 95%, or 99% identity thereto); SEQ ID NOs: 7354, 201, 202, 223, 224, and 7369, respectively (or a sequence having at least 85%, 90%, 95%, or 99% identity thereto); SEQ ID NOs: 7354, 201, 202, 7367, 7368, and 7369, respectively (or a sequence having at least 85%, 90%, 95%, or 99% identity thereto); SEQ ID NOs: 7354, 7355, 202, 223, 224, and 225, respectively (or a sequence having at least 85%, 90%, 95%, or 99% identity thereto); SEQ ID NOs: 7354, 7355, 202, 7367, 224, and 225, respectively (or a sequence having at least 85%, 90%, 95%, or 99% identity thereto); SEQ ID NOs: 7354, 7355, 202, 223, 7368, and 225, respectively (or a sequence having at least 85%, 90%, 95%, or 99% identity thereto); SEQ ID NOs: 7354, 7355, 202, 223, 224, and 7369, respectively (or a sequence having at least 85%, 90%, 95%, or 99% identity thereto); or SEQ ID NOs: 7354, 7355, 202, 7367, 7368, and 7369, respectively (or a sequence having at least 85%, 90%, 95%, or 99% identity thereto).

[0351] In some embodiments, the VH comprises an amino acid sequence selected from the group consisting of SEQ ID NOs: 7351, 253, 250-252, 254, 7343, 7344, 7350, and 7352 (or a sequence having at least 85%, 90%, 95%, or 99% identity thereto) and/or the VL comprises an amino acid sequence selected from the group consisting of SEQ ID NOs: 258, 255-257, 259, 260, and 7357-7360 (or a sequence having at least 85%, 90%, 95%, or 99% identity thereto). In some embodiments, the VH and VL comprise the amino acid sequences of SEQ ID NOs: 7351 and 258, respectively (or a sequence having at least 85%, 90%, 95%, or 99% identity thereto). In some embodiments, the VH and VL comprise the amino acid sequences of SEQ ID NOs: 253 and 258, respectively (or a sequence having at least 85%, 90%, 95%, or 99% identity thereto).

[0352] In some embodiments, the antibody molecule or fragment thereof comprises: a heavy chain variable region (VH) comprising a heavy chain framework region 1 (VHFWR1) amino acid sequence of SEQ ID NO: 215 (or a sequence with no more than 1, 2, 3, 4, 5, or 6 mutations, e.g., substitutions, additions, or deletions, therefrom), a VHFWR2 amino acid sequence of SEQ ID NO: 216 (or a sequence with no more than 1, 2, 3, 4, 5, or 6 mutations, e.g., substitutions, additions, or deletions, therefrom), a VHFWR3 amino acid sequence of SEQ ID NO: 217 (or a sequence with no more than 1, 2, 3, 4, 5, or 6 mutations, e.g., substitutions, additions, or deletions, therefrom), and/or a VHFWR4 amino acid sequence of SEQ ID NO: 218 (or a sequence with no more than 1, 2, 3, 4, 5, or 6 mutations, e.g., substitutions, additions, or deletions, therefrom), and a light chain variable region (VL) comprising a light chain framework region 1 (VLFWR1) amino acid sequence of SEQ ID NO: 238 (or a sequence with no more than 1, 2, 3, 4, 5, or 6 mutations, e.g., substitutions, additions, or deletions, therefrom), a VLFWR2 amino acid sequence of SEQ ID NO: 239 (or a sequence with no more than 1, 2, 3, 4, 5, or 6 mutations, e.g., substitutions, additions, or deletions, therefrom), a VLFWR3 amino acid sequence of SEQ ID NO: 240 (or a sequence with no more than 1, 2, 3, 4, 5, or 6 mutations, e.g., substitutions, additions, or deletions, therefrom), and/or a VLFWR4 amino acid sequence of SEQ ID NO: 241 (or a sequence with no more than 1, 2, 3, 4, 5, or 6 mutations, e.g., substitutions, additions, or deletions, therefrom).

[0353] In some embodiments, the antibody molecule or fragment thereof comprises a VH comprising a VHCDR1 amino acid sequence of SEQ ID NO: 200, a VHCDR2 amino acid sequence of SEQ ID NO: 201, and/or a VHCDR3 amino acid sequence of SEQ ID NO: 202.

[0354] In some embodiments, the antibody molecule or fragment thereof comprises a VL comprising a VLCDR1 amino acid sequence of SEQ ID NO: 223, a VLCDR2 amino acid sequence of SEQ ID NO: 224, and a VLCDR3 amino acid sequence of SEQ ID NO: 225.

[0355] In some embodiments, the antibody molecule or fragment thereof comprises a VH comprising the amino acid sequence of SEQ ID NO: 253 (or an amino acid sequence having at least about 75%, 80%, 85%, 90%, 95%, or 99% sequence identity thereto), and/or a VL comprising the amino acid sequence of SEQ ID NO: 258 (or an amino acid sequence having at least about 93%, 95%, or 99% sequence identity thereto). In some embodiments, the antibody molecule or fragment thereof comprises a VH and/or VL substantially homologous to SEQ ID NOs: 253 and/or 258.

### Antibody Molecules Targeting TRBC2

[0356] In another aspect, the present disclosure features an antibody molecule, e.g., a monoclonal antibody molecule, or fragment thereof that binds TRBC2.

[0357] In some embodiments, the antibody molecule, or fragment thereof, that binds to TRBC2 comprises one or more CDRs (e.g., VHCDR1, VHCDR2, VHCDR3, VLCDR1, VLCDR2, and/or VLCDR3) disclosed in Table 21 or Table 22, or a sequence having at least 85%, 90%, 95%, or 99% identity thereto. In some embodiments, the antibody molecule, or fragment thereof, that binds to TRBC2 comprises one or more framework regions (e.g., VHFWR1, VHFWR2, VHFWR3, VHFWR4, VLFWR1, VLFWR2, VLFWR3, and/or VLFWR4) disclosed in Table 21 or Table 22, or a sequence having at least 85%, 90%, 95%, or 99% identity thereto. In some embodiments, the antibody molecule, or fragment thereof, that binds to TRBC2 comprises a VH and/or a VL disclosed in Table 23, or a sequence having at least 85%, 90%, 95%, or 99% identity thereto. In some embodiments, the antibody molecule, or fragment thereof, that binds to TRBC2 comprises an amino acid sequence disclosed in Table 24, or a sequence having at least 85%, 90%, 95%, or 99% identity thereto.

[0358] In some embodiments, the antibody molecule, or fragment thereof, that binds to TRBC2 comprises a VH comprising a heavy chain complementarity determining region 1 (VHCDR1), a VHCDR2, and a VHCDR3, and a VL comprising a light chain complementarity determining region 1 (VLCDR1), a VLCDR2, and a VLCDR3.

[0359] In some embodiments, the VHCDR1, VHCDR2, and VHCDR3 comprise the amino acid sequences of GXlX2MH, wherein X1 is Y or F, and X2 is P, H, V, Y, K, or A, and SEQ ID NOs: 201 and 7442, respectively (or a sequence having at least 85%, 90%, 95%, or 99% identity thereto). In some embodiments, the VHCDR1, VHCDR2, and VHCDR3 comprise the amino acid sequences of SEQ ID NOs: 7422, 201, and 7403, respectively (or a sequence having at least 85%, 90%, 95%, or 99% identity thereto). In some embodiments, the VHCDR1, VHCDR2, and VHCDR3 comprise the amino acid sequences of SEQ ID NOs: 7401, 201, and 7403, respectively (or a sequence having at least 85%, 90%, 95%, or 99% identity thereto). In some embodiments, the VHCDR1, VHCDR2, and VHCDR3 comprise the amino acid sequences of SEQ ID NOs: 7394, 201, and 7396, respectively (or a sequence having at least 85%, 90%, 95%, or 99% identity thereto). In some embodiments, the VHCDR1, VHCDR2, and VHCDR3 comprise the amino acid sequences of SEQ ID NOs: 7346, 201, and 7398, respectively (or a sequence having at least 85%, 90%, 95%, or 99% identity thereto). In some embodiments, the VHCDR1, VHCDR2, and VHCDR3 comprise the amino acid sequences of SEQ ID NOs: 7346, 201, and 7400, respectively (or a sequence having at least 85%, 90%, 95%, or 99% identity thereto). In some embodiments, the VHCDR1, VHCDR2, and VHCDR3 comprise the amino acid sequences of SEQ ID NOs: 7405, 201, and 7403, respectively (or a sequence having at least 85%, 90%, 95%, or 99% identity thereto). In some embodiments, the VHCDR1, VHCDR2, and VHCDR3 comprise the amino acid sequences of SEQ ID NOs: 7407, 201, and 7403, respectively (or a sequence having at least 85%, 90%, 95%, or 99% identity thereto). In some embodiments, the VHCDR1, VHCDR2, and VHCDR3 comprise the amino acid sequences of SEQ ID NOs: 7427, 201, and 7403, respectively (or a sequence having at least 85%, 90%, 95%, or 99% identity thereto). In some embodiments, the VHCDR1, VHCDR2, and VHCDR3 comprise the amino acid sequences of SEQ ID NOs: 7430, 201, and 7403, respectively (or a sequence having at least 85%, 90%, 95%, or 99% identity thereto).

[0360] In some embodiments, the VLCDR1, VLCDR2, and VLCDR3 comprise the amino acid sequences of SEQ ID NOs: 7443, 224, and 225, respectively (or a sequence having at least 85%, 90%, 95%, or 99% identity thereto). In some embodiments, the VLCDR1, VLCDR2, and VLCDR3 comprise the amino acid sequences of SEQ ID NOs: 7410, 224, and 225, respectively (or a sequence having at least 85%, 90%, 95%, or 99% identity thereto). In some embodiments, the VLCDR1, VLCDR2, and VLCDR3 comprise the amino acid sequences of SEQ ID NOs: 7409, 224, and 225, respectively (or a sequence having at least 85%, 90%, 95%, or 99% identity thereto).

[0361] In some embodiments, the VHCDR1, VHCDR2, VHCDR3, VLCDR1, VLCDR2, and VLCDR3 comprise the amino acid sequences of GXlX2MH, wherein X1 is Y or F, and X2 is P, H, V, Y, K, or A, and SEQ ID NOs: 201, 7442, 7443, 224, and 225, respectively (or a sequence having at least 85%, 90%, 95%, or 99% identity thereto). In some embodiments, the VHCDR1, VHCDR2, VHCDR3, VLCDR1, VLCDR2, and VLCDR3 comprise the amino acid sequences of SEQ ID NOs: 7422, 201, 7403, 7410, 224, and 225, respectively (or a sequence having at least 85%, 90%, 95%, or 99% identity thereto). In some embodiments, the VHCDR1, VHCDR2, VHCDR3, VLCDR1, VLCDR2, and VLCDR3 comprise the amino acid sequences of SEQ ID NOs: 7401, 201, 7403, 7410, 224, and 225, respectively (or a sequence having at least 85%, 90%, 95%, or 99% identity thereto). In some embodiments, the VHCDR1, VHCDR2, VHCDR3, VLCDR1, VLCDR2, and VLCDR3 comprise the amino acid sequences of: SEQ ID NOs: 7394, 201, 7396, 7410, 224, and 225, respectively (or a sequence having at least 85%, 90%, 95%, or 99% identity thereto); SEQ ID NOs: 7346, 201, 7398, 7410, 224, and 225, respectively (or a sequence having at least 85%, 90%, 95%, or 99% identity thereto); SEQ ID NOs: 7346, 201, 7400, 7410, 224, and 225, respectively (or a sequence having at least 85%, 90%, 95%, or 99% identity thereto); SEQ ID NOs: 7405, 201, 7403, 7410, 224, and 225, respectively (or a sequence having at least 85%, 90%, 95%, or 99% identity thereto); SEQ ID NOs: 7407, 201, 7403, 7410, 224, and 225, respectively (or a sequence having at least 85%, 90%, 95%, or 99% identity thereto); SEQ ID NOs: 7427, 201, 7403, 7410, 224, and 225, respectively (or a sequence having at least 85%, 90%, 95%, or 99% identity thereto); SEQ ID NOs: 7430, 201, 7403, 7410, 224, and 225, respectively (or a sequence having at least 85%, 90%, 95%, or 99% identity thereto); SEQ ID NOs: 7422, 201, 7403, 7409, 224, and 225, respectively (or a sequence having at least 85%, 90%, 95%, or 99% identity thereto); SEQ ID NOs: 7401, 201, 7403, 7409, 224, and 225, respectively (or a sequence having at least 85%, 90%, 95%, or 99% identity thereto); SEQ ID NOs: 7394, 201, 7396, 7409, 224, and 225, respectively (or a sequence having at least 85%, 90%, 95%, or 99% identity thereto); SEQ ID NOs: 7346, 201, 7398, 7409, 224, and 225, respectively (or a sequence having at least 85%, 90%, 95%, or 99% identity thereto); SEQ ID NOs: 7346, 201, 7400, 7409, 224, and 225, respectively (or a sequence having at least 85%, 90%, 95%, or 99% identity thereto); SEQ ID NOs: 7405, 201, 7403, 7409, 224, and 225, respectively (or a sequence having at least 85%, 90%, 95%, or 99% identity thereto); SEQ ID NOs: 7407, 201, 7403, 7409, 224, and 225, respectively (or a sequence having at least 85%, 90%, 95%, or 99% identity thereto); SEQ ID NOs: 7427, 201, 7403, 7409, 224, and 225, respectively (or a sequence having at least 85%, 90%, 95%, or 99% identity thereto); or SEQ ID NOs: 7430, 201, 7403, 7409, 224, and 225, respectively (or a sequence having at least 85%, 90%, 95%, or 99% identity thereto).

[0362] In some embodiments, the VH comprises an amino acid sequence selected from the group consisting of SEQ ID NOs: 7420, 7423, 7411, 7412, 7413, 7414, 7415, 7416, 7417, 7425, 7428, and 7431 (or a sequence having at least 85%, 90%, 95%, or 99% identity thereto) and/or the VL comprises an amino acid sequence selected from the group consisting of SEQ ID NOs: 7419 and 7418 (or a sequence having at least 85%, 90%, 95%, or 99% identity thereto). In some embodiments, the VH and VL comprise the amino acid sequences of SEQ ID NOs: 7420 and 7419, respectively (or a sequence having at least 85%, 90%, 95%, or 99% identity thereto). In some embodiments, the VH and VL comprise the amino acid sequences of SEQ ID NOs: 7423 and 7419, respectively (or a sequence having at least 85%, 90%, 95%, or 99% identity thereto). In some embodiments, the VH and VL comprise the amino acid sequences of SEQ ID NOs: 7411 and 7419, respectively (or a sequence having at least 85%, 90%, 95%, or 99% identity thereto). In some embodiments, the VH and VL comprise the amino acid sequences of SEQ ID NOs: 7412 and 7419, respectively (or a sequence having at least 85%, 90%, 95%, or 99% identity thereto). In some embodiments, the VH and VL comprise the amino acid sequences of SEQ ID NOs: 7413 and 7419, respectively (or a sequence having at least 85%, 90%, 95%, or 99% identity thereto). In some embodiments, the VH and VL comprise the amino acid sequences of SEQ ID NOs: 7414 and 7419, respectively (or a sequence having at least 85%, 90%, 95%, or 99% identity thereto). In some embodiments, the VH and VL comprise the amino acid sequences of SEQ ID NOs: 7415 and 7419, respectively (or a sequence having at least 85%, 90%, 95%, or 99% identity thereto). In some embodiments, the VH and VL comprise the amino acid sequences of SEQ ID NOs: 7416 and 7419, respectively (or a sequence having at least 85%, 90%, 95%, or 99% identity thereto). In some embodiments, the VH and VL comprise the amino acid sequences of SEQ ID NOs: 7417 and 7419, respectively (or a sequence having at least 85%, 90%, 95%, or 99% identity thereto). In some embodiments, the VH and VL comprise the amino acid sequences of SEQ ID NOs: 7425 and 7419, respectively (or a sequence having at least 85%, 90%, 95%, or 99% identity thereto). In some embodiments, the VH and VL comprise the amino acid sequences of SEQ ID NOs: 7428 and 7419, respectively (or a sequence having at least 85%, 90%, 95%, or 99% identity thereto). In some embodiments, the VH and VL comprise the amino acid sequences of SEQ ID NOs: 7431 and 7419, respectively (or a sequence having at least 85%, 90%, 95%, or 99% identity thereto). In some embodiments, the VH and VL comprise the amino acid sequences of SEQ ID NOs: 7420 and 7418, respectively (or a sequence having at least 85%, 90%, 95%, or 99% identity thereto). In some embodiments, the VH and VL comprise the amino acid sequences of SEQ ID NOs: 7423 and 7418, respectively (or a sequence having at least 85%, 90%, 95%, or 99% identity thereto). In some embodiments, the VH and VL comprise the amino acid sequences of SEQ ID NOs: 7411 and 7418, respectively (or a sequence having at least 85%, 90%, 95%, or 99% identity thereto). In some embodiments, the VH and VL comprise the amino acid sequences of SEQ ID NOs: 7412 and 7418, respectively (or a sequence having at least 85%, 90%, 95%, or 99% identity thereto). In some embodiments, the VH and VL comprise the amino acid sequences of SEQ ID NOs: 7413 and 7418, respectively (or a sequence having at least 85%, 90%, 95%, or 99% identity thereto). In some embodiments, the VH and VL comprise the amino acid sequences of SEQ ID NOs: 7414 and 7418, respectively (or a sequence having at least 85%, 90%, 95%, or 99% identity thereto). In some embodiments, the VH and VL comprise the amino acid sequences of SEQ ID NOs: 7415 and 7418, respectively (or a sequence having at least 85%, 90%, 95%, or 99% identity thereto). In some embodiments, the VH and VL comprise the amino acid sequences of SEQ ID NOs: 7416 and 7418, respectively (or a sequence having at least 85%, 90%, 95%, or 99% identity thereto). In some embodiments, the VH and VL comprise the amino acid sequences of SEQ ID NOs: 7417 and 7418, respectively (or a sequence having at least 85%, 90%, 95%, or 99% identity thereto). In some embodiments, the VH and VL comprise the amino acid sequences of SEQ ID NOs: 7425 and 7418, respectively (or a sequence having at least 85%, 90%, 95%, or 99% identity thereto). In some embodiments, the VH and VL comprise the amino acid sequences of SEQ ID NOs: 7428 and 7418, respectively (or a sequence having at least 85%, 90%, 95%, or 99% identity thereto). In some embodiments, the VH and VL comprise the amino acid sequences of SEQ ID NOs: 7431 and 7418, respectively (or a sequence having at least 85%, 90%, 95%, or 99% identity thereto).

[0363] In another aspect, the disclosure features an antibody molecule, e.g., an IgM antibody molecule comprising: (i) a first antigen binding domain that selectively binds to T cell receptor beta chain constant domain 1 (TRBC1) or T cell receptor beta chain constant domain 2 (TRBC2), and (ii) a complement activating domain that activates the complement pathway, e.g., by binding C1q. In some embodiments, an antibody molecule, e.g., IgM antibody molecule, comprises an antigen binding domain that targets TRBC1. In some embodiments, the antibody molecule is an IgM antibody molecule, e.g., that multimerizes into tetramers, pentamers, and/or hexamers and is capable of activating complement pathway(s). In some embodiments, the IgM antibody molecule comprises an antigen binding domain that targets TRBC1 comprising a heavy chain comprising the amino acid sequence of SEQ ID NO: 6173 (or an amino acid sequence having at least about 93%, 95%, or 99% sequence identity to SEQ ID NO: 6173).

(SEQ ID NO: 6173)
METDTLLLWVLLLWVPGSTGQVQLVQSGAEVKKPGSSVKV
SCKASGYTFTGYVMHWVRQAPGQGLEWMGFINPYNDDIQS
NERFRGRVTITSDKSTTTAYMELSSLRSEDTAVYYCARGA
GYNFDGAYRFFDFWGQGTLVTVSSGSASAPTLFPLVSCEN
SPSDTSSVAVGCLAQDFLPDSITFSWKYKNNSDISSTRGF
PSVLRGGKYAATSQVLLPSKDVMQGTDEHVVCKVQHPNGN
KEKNVPLPVIAELPPKVSVFVPPRDGFFGNPRKSKLICQA
TGFSPRQIQVSWLREGKQVGSGVTTDQVQAEAKESGPTTY
KVTSTLTIKESDWLGQSMFTCRVDHRGLTFQQNASSMCVP
DQDTAIRVFAIPPSFASIFLTKSTKLTCLVTDLTTYDSVT
ISWTRQNGEAVKTHTNISESHPNATFSAVGEASICEDDWN
SGERFTCTVTHTDLPSPLKQTISRPKGVALHRPDVYLLPP
AREQLNLRESATITCLVTGFSPADVFVQWMQRGQPLSPEK
YVTSAPMPEPQAPGRYFAHSILTVSEEEWNTGETYTCVVA
HEALPNRVTERTVDKSTGKPTLYNVSLVMSDTAGTCY.

[0364] In some embodiments, the IgM antibody molecule comprises an antigen binding domain that targets TRBC1 comprising a light chain comprising the amino acid sequence of SEQ ID NO: 6174 (or an amino acid sequence having at least about 93%, 95%, or 99% sequence identity to SEQ ID NO: 6174).

(SEQ ID NO: 6174)
MKNHLLFWGVLAVFIKAVHVKAQEDERIVLVDNKCKCARI
TSRIIRSSEDPNEDIVERNIRIIVPLNNRENISDPTSPLR
TRFVYHLSDLCKKCDPTEVELDNQIVTATQSNICDEDSAT
ETCYTYDRNKCYTAVVPLVYGGETKMVETALTPDACYPD.

[0365] In some embodiments, the IgM antibody molecule comprises an antigen binding domain that targets TRBC1 comprising amino acid sequences of SEQ ID NO: 6173 and 6174 (or amino acid sequences having at least about 93%, 95%, or 99% sequence identity to SEQ ID NO: 6173 and 6174) and an amino acid sequence of a light chain sequence provided herein, e.g., in Tables 3 or 4.

[0366] In some embodiments, the complement activating domain comprises a portion of an antibody molecule capable of binding or being bound by C1q, e.g., a portion of a IgG1, IgG2, IgG3, IgG4, IgM, IgA1, IgA2, IgD, or IgE. In some embodiments, a complement activating domain comprises a Ch2, Ch3, or Ch4 domain.

[0367] Without wishing to be bound by theory, it is thought that complement activation in proximity to a target cell (e.g., a TRBC1 or TRBC2 expressing cell, e.g., a lymphocyte expressing TRBC1 or TRBC2, e.g., a lymphoma cell expressing TRBC1 or TRBC2) may induce the death of the target cell. In some embodiments, use of an antibody molecule, e.g., IgM antibody molecule, or a multifunctional molecule in the methods described herein induces complement mediated cell death of the target cell.

[0368] In another aspect, the disclosure features a multispecific antibody molecule (e.g., a bispecific antibody molecule) that binds to TRBC1 and NKp30. In some embodiments, the multispecific antibody molecule comprises one or more moieties that bind to TRBC1, e.g., one or more Fabs that bind to TRBC1, e.g., one or two Fabs that bind to TRBC1. In some embodiments, the multispecific antibody molecule comprises one or more moieties that bind to NKp30, e.g., one or more scFvs that bind to NKp30, e.g., one or two scFvs that bind to NKp30. In some embodiments, the moiety that binds to TRBC1 comprises an anti-TRBC1 sequence disclosed herein, e.g., comprises a CDR, VH, VL, heavy chain, or light chain sequence disclosed in Tables 2-5, or a sequence having at least 70, 80, 90, 95, or 99% identity thereto. In some embodiments, the moiety that binds to NKp30 comprises an anti-NKp30 sequence disclosed herein, e.g., comprises a CDR, VH, VL, heavy chain, or light chain sequence disclosed in Tables 7, 8, 8A, 8B, 9, 10, or a sequence having at least 70, 80, 90, 95, or 99% identity thereto.

[0369] In some embodiments, the multispecific antibody molecule comprises a configuration shown in FIG. 1A. In some embodiments, the multispecific antibody molecule comprises an anti-TRBC1 antibody molecule and an anti-NKp30 antibody molecule, e.g., an anti-TRBC1 antibody molecule comprising two heavy chains and two light chains, and an anti-NKp30 scFv that is fused to the N-terminus of one of the heavy chains of the anti-TRBC1 antibody. In some embodiments, the two heavy chains of the anti-TRBC1 antibody form a heterodimer, e.g., via knob-and-hole mutations. In some embodiments, the two heavy chains of the anti-TRBC1 antibody comprise the N297A mutation. In some embodiments, the two heavy chains of the anti-TRBC1 antibody do not comprise the N297A mutation. In some embodiments, the multispecific antibody molecule comprises a first chain, a second chain, a third chain, and a fourth chain, wherein the first chain comprises an anti-TRBC1 light chain variable region (VL) and a light chain constant region (CL); the second chain comprises an anti-NKp30 scFv, an anti-TRBC1 heavy chain variable region (VH), a CH1, a CH2, and a CH3; the third chain comprises an anti-TRBC1 VH, a CH1, a CH2, and a CH3; and the fourth chain comprises an anti-TRBC1 VL and a CL.

[0370] In some embodiments, the multispecific antibody molecule comprises a configuration shown in FIG. 1B. In some embodiments, the multispecific antibody molecule comprises an anti-TRBC1 antibody molecule and an anti-NKp30 antibody molecule. In some embodiments, the multispecific antibody molecule comprises an anti-TRBC1 Fab, an anti-NKp30 scFv, and an Fc dimer comprising two Fc chains. In some embodiments, the C-terminus of the heavy chain of the anti-TRBC1 Fab is fused to the N-terminus of one Fc chain, and the anti-NKp30 scFv is fused to the N-terminus of the other Fc chain. In some embodiments, the two Fc chains form a heterodimer, e.g., via knob-and-hole mutations. In some embodiments, the two Fc chains comprise the N297A mutation. In some embodiments, the two Fc chains do not comprise the N297A mutation. In some embodiments, the multispecific antibody molecule comprises a first chain, a second chain, and a third chain, wherein the first chain comprises an anti-TRBC1 VL and a CL; the second chain comprises an anti-TRBC1 VH, a CH1, a CH2, and a CH3; and the third chain comprises an anti-NKp30 scFv, a CH2, and a CH3.

[0371] In some embodiments, the multispecific antibody molecule comprises a configuration shown in FIG. 1C. In some embodiments, the multispecific antibody molecule comprises an anti-TRBC1 antibody molecule and an anti-NKp30 antibody molecule, e.g., an anti-TRBC1 antibody molecule comprising two heavy chains and two light chains, and two anti-NKp30 scFvs that are fused to the C-terminus of the two light chains of the anti-TRBC1 antibody molecule, respectively. In some embodiments, the two heavy chains of the anti-TRBC1 antibody form a homodimer. In some embodiments, the two heavy chains of the anti-TRBC1 antibody comprise the N297A mutation. In some embodiments, the two heavy chains of the anti-TRBC1 antibody do not comprise the N297A mutation. In some embodiments, the multispecific antibody molecule comprises a first chain, a second chain, a third chain, and a fourth chain, wherein the first chain comprises an anti-TRBC1 VL, a CL, and an anti-NKp30 scFv; the second chain comprises an anti-TRBC1 VH, a CH1, a CH2, and a CH3; the third chain comprises an anti-TRBC1 VH, a CH1, a CH2, and a CH3; and the fourth chain comprises an anti-TRBC1 VL, a CL, and an anti-NKp30 scFv.

[0372] In some embodiments, the multispecific antibody molecule comprises a configuration shown in FIG. 1D. In some embodiments, the multispecific antibody molecule comprises an anti-TRBC1 antibody molecule and an anti-NKp30 antibody molecule, e.g., an anti-TRBC1 antibody molecule comprising two heavy chains and two light chains, and two anti-NKp30 scFvs that are fused to the N-terminus of the two heavy chains of the anti-TRBC1 antibody molecule, respectively. In some embodiments, the two heavy chains of the anti-TRBC1 antibody form a homodimer. In some embodiments, the two heavy chains of the anti-TRBC1 antibody comprise the N297A mutation. In some embodiments, the two heavy chains of the anti-TRBC1 antibody do not comprise the N297A mutation. In some embodiments, the multispecific antibody molecule comprises a first chain, a second chain, a third chain, and a fourth chain, wherein the first chain comprises an anti-TRBC1 VL and a CL; the second chain comprises an anti-NKp30 scFv, an anti-TRBC1 VH, a CH1, a CH2, and a CH3; the third chain comprises an anti-NKp30 scFv, an anti-TRBC1 VH, a CH1, a CH2, and a CH3; and the fourth chain comprises an anti-TRBC1 VL and a CL.

[0373] In another aspect, the disclosure features an antibody molecule that comprises a moiety that binds to TRBC1 and a TRAIL molecule (e.g., atrimeric, dimeric, or monomeric TRAIL molecule). In some embodiments, the antibody molecule comprises one or more moieties that bind to TRBC1, e.g., one or more Fabs that bind to TRBC1, e.g., one Fab that binds to TRBC1. In some embodiments, the moiety that binds to TRBC1 comprises an anti-TRBC1 sequence disclosed herein, e.g., comprises a CDR, VH, VL, heavy chain, or light chain sequence disclosed in Tables 2-5, or a sequence having at least 70, 80, 90, 95, or 99% identity thereto. In some embodiments, the antibody molecule comprises a TRAIL molecule (e.g., a trimeric, dimeric, or monomeric TRAIL molecule). In some embodiments, each monomer of TRAIL comprises amino acid residues 122-281 of human TRAIL, or a sequence having at least 70, 80, 90, 95, or 99% identity thereto. In some embodiments, each monomer of TRAIL comprises amino acid residues 95-281 of human TRAIL, or a sequence having at least 70, 80, 90, 95, or 99% identity thereto.

[0374] In some embodiments, the antibody molecule comprises a configuration shown in FIGS. 2A-2F. In some embodiments, the antibody molecule comprises a moiety that binds to TRBC1 and a trimeric, dimeric, or monomeric TRAIL molecule, e.g., comprises an anti-TRBC1 Fab, a trimeric, dimeric, or monomeric TRAIL molecule, and an Fc dimer comprising two Fc chains. In some embodiments, the two Fc chains form a heterodimer, e.g., via knob-and-hold mutations. In some embodiments, the two Fc chains comprise the N297A mutation. In some embodiments, the two Fc chains do not comprise the N297A mutation. In some embodiments, the C-terminus of the heavy chain of the anti-TRBC1 Fab is fused to the N-terminus of one Fc chain. In some embodiments, the trimeric, dimeric, or monomeric TRAIL molecule is fused to the N-terminus of the other Fc chain. In some embodiments, the antibody molecule comprises a first chain, a second chain, and a third chain. In some embodiments, the first chain comprises an anti-TRBC1 VL and a CL, e.g., comprises the amino acid sequence of SEQ ID NO: 6169, or a sequence having at least 70, 80, 90, 95, or 99% identity thereto. In some embodiments, the second chain comprises an anti-TRBC1 VH, a CH1, a CH2, and a CH3, e.g., comprises the amino acid sequence of SEQ ID NO: 6167, or a sequence having at least 70, 80, 90, 95, or 99% identity thereto. In some embodiments, the third chain comprises a trimeric TRAIL molecule, a CH2, and a CH3, e.g., comprises the amino acid sequence of SEQ ID NO: 6159 or 6162, or a sequence having at least 70, 80, 90, 95, or 99% identity thereto. In some embodiments, the third chain comprises a dimeric TRAIL molecule, a CH2, and a CH3, e.g., comprises the amino acid sequence of SEQ ID NO: 6158 or 6161, or a sequence having at least 70, 80, 90, 95, or 99% identity thereto. In some embodiments, the third chain comprises a monomeric TRAIL molecule, a CH2, and a CH3, e.g., comprises the amino acid sequence of SEQ ID NO: 6157 or 6160, or a sequence having at least 70, 80, 90, 95, or 99% identity thereto.

[0375] In another aspect, the disclosure features a multispecific antibody molecule (e.g., a bispecific antibody molecule) that binds to TRBC1 and DR5. In some embodiments, the multispecific antibody molecule comprises one or more moieties that bind to TRBC1, e.g., one or more Fabs that bind to TRBC1, e.g., one Fab that binds to TRBC1. In some embodiments, the multispecific antibody molecule comprises one or more moieties that bind to DR5, e.g., one or more scFvs that bind to DR5, e.g., one or two scFvs that bind to DR5. In some embodiments, the moiety that binds to TRBC1 comprises an anti-TRBC1 sequence disclosed herein, e.g., comprises a CDR, VH, VL, heavy chain, or light chain sequence disclosed in Tables 2-5, or a sequence having at least 70, 80, 90, 95, or 99% identity thereto. In some embodiments, the moiety that binds to DR5 comprises an anti-DR5 sequence disclosed herein, e.g., comprises a CDR, VH, VL, heavy chain, or light chain sequence disclosed in Table 11, or a sequence having at least 70, 80, 90, 95, or 99% identity thereto.

[0376] In some embodiments, the multispecific antibody molecule comprises a configuration shown in FIG. 3A. In some embodiments, the multispecific antibody molecule comprises an anti-TRBC1 Fab, an anti-DR5 scFv, and an Fc dimer comprising two Fc chains. In some embodiments, the two Fc chains form a heterodimer, e.g., via knob-and-hold mutations. In some embodiments, the two Fc chains comprise the N297A mutation. In some embodiments, the two Fc chains do not comprise the N297A mutation. In some embodiments, the C-terminus of the heavy chain of the anti-TRBC1 Fab is fused to the N-terminus of one Fc chain. In some embodiments, the anti-DR5 scFv is fused to the N-terminus of the other Fc chain. In some embodiments, the multispecific antibody molecule comprises a first chain, a second chain, and a third chain. In some embodiments, the first chain comprises an anti-TRBC1 VL and a CL, e.g., comprises the amino acid sequence of SEQ ID NO: 6169, or a sequence having at least 70, 80, 90, 95, or 99% identity thereto. In some embodiments, the second chain comprises an anti-TRBC1 VH, a CH1, a CH2, and a CH3, e.g., comprises the amino acid sequence of SEQ ID NO: 6167, or a sequence having at least 70, 80, 90, 95, or 99% identity thereto. In some embodiments, the third chain comprises an anti-DR5 scFv, a CH2, and a CH3, e.g., comprises the amino acid sequence of SEQ ID NO: 6163, or a sequence having at least 70, 80, 90, 95, or 99% identity thereto.

[0377] In some embodiments, the multispecific antibody molecule comprises a configuration shown in FIG. 3B. In some embodiments, the multispecific antibody molecule comprises an anti-TRBC1 antibody molecule and an anti-DR5 antibody molecule, e.g., an anti-TRBC1 antibody molecule comprising two heavy chains and two light chains, and two anti-DR5 scFvs that are fused to the C-terminus of the two light chains of the anti-TRBC1 antibody, respectively. In some embodiments, the two heavy chains of the anti-TRBC1 antibody comprise the N297A mutation. In some embodiments, the two heavy chains of the anti-TRBC1 antibody do not comprise the N297A mutation. In some embodiments, the multispecific antibody molecule comprises a first chain, a second chain, a third chain, and a fourth chain. In some embodiments, the first chain comprises an anti-TRBC1 VL, a CL, and an anti-DR5 scFv, e.g., comprises the amino acid sequence of SEQ ID NO: 6170, or a sequence having at least 70, 80, 90, 95, or 99% identity thereto. In some embodiments, the second chain comprises an anti-TRBC1 VH, a CH1, a CH2, and a CH3, e.g., comprises the amino acid sequence of SEQ ID NO: 6168, or a sequence having at least 70, 80, 90, 95, or 99% identity thereto. In some embodiments, the fourth chain comprises an anti-TRBC1 VH, a CH1, a CH2, and a CH3, e.g., comprises the amino acid sequence of SEQ ID NO: 6168, or a sequence having at least 70, 80, 90, 95, or 99% identity thereto. In some embodiments, the first chain comprises an anti-TRBC1 VL, a CL, and an anti-DR5 scFv, e.g., comprises the amino acid sequence of SEQ ID NO: 6170, or a sequence having at least 70, 80, 90, 95, or 99% identity thereto.

[0378] Uses of the antibody molecules disclosed herein include but are not limited to methods of treating cancer (e.g., a cancer expressing TRBC1) disclosed herein; methods of identifying, evaluating, or selecting a subject in need of treatment (e.g., determining whether a subject has cancer cells that express TRBC1) disclosed herein; and methods of laboratory or diagnostic analysis (e.g., immunological assays comprising detecting the presence and/or level of TRBC1 or TRBC1 expressing cells).

### Cytokine Molecules and Cytokine Inhibitor Molecules

[0379] Cytokines are generally polypeptides that influence cellular activity, for example, through signal transduction pathways. Accordingly, a cytokine of the multispecific or multifunctional polypeptide is useful and can be associated with receptor-mediated signaling that transmits a signal from outside the cell membrane to modulate a response within the cell. Cytokines are proteinaceous signaling compounds that are mediators of the immune response. They control many different cellular functions including proliferation, differentiation and cell survival/apoptosis; cytokines are also involved in several pathophysiological processes including viral infections and autoimmune diseases. Cytokines are synthesized under various stimuli by a variety of cells of both the innate (monocytes, macrophages, dendritic cells) and adaptive (T- and B-cells) immune systems. Cytokines can be classified into two groups: pro- and anti-inflammatory. Pro-inflammatory cytokines, including IFNγ, IL-1, IL-6 and TNF-alpha, are predominantly derived from the innate immune cells and Th1 cells. Anti-inflammatory cytokines, including IL-10, IL-4, IL-13 and IL-5, are synthesized from Th2 immune cells.

[0380] The present disclosure provides, inter alia, multispecific (e.g., bi-, tri-, quad-specific) or multifunctional molecules, that include, e.g., are engineered to contain, one or more cytokine molecules, e.g., immunomodulatory (e.g., proinflammatory) cytokines and variants, e.g., functional variants, thereof. Accordingly, in some embodiments, the cytokine molecule is an interleukin or a variant, e.g., a functional variant thereof. In some embodiments the interleukin is a proinflammatory interleukin. In some embodiments the interleukin is chosen from interleukin-2 (IL-2), interleukin-12 (IL-12), interleukin-15 (IL-15), interleukin-18 (IL-18), interleukin-21 (IL-21), interleukin-7 (IL-7), or interferon gamma. In some embodiments, the cytokine molecule is a proinflammatory cytokine.

[0381] In certain embodiments, the cytokine is a single chain cytokine. In certain embodiments, the cytokine is a multichain cytokine (e.g., the cytokine comprises 2 or more (e.g., 2) polypeptide chains. An exemplary multichain cytokine is IL-12.

[0382] Examples of useful cytokines include, but are not limited to, GM-CSF, IL-1α, IL-1β, IL-2, IL-3, IL-4, IL-5, IL-6, IL-7, IL-8, IL-10, IL-12, IL-21, IFN-α, IFN-β, IFN-γ, MIP-1α, MIP-1β, TGF-β, TNF-α, and TNFβ. In one embodiment the cytokine of the multispecific or multifunctional polypeptide is a cytokine selected from the group of GM-CSF, IL-2, IL-7, IL-8, IL-10, IL-12, IL-15, IL-21, IFN-α, IFN-γ, MIP-1α, MIP-1β and TGF-β. In one embodiment the cytokine of the i the multispecific or multifunctional polypeptide is a cytokine selected from the group of IL-2, IL-7, IL-10, IL-12, IL-15, IFN-α, and IFN-γ. In certain embodiments the cytokine is mutated to remove N- and/or O-glycosylation sites. Elimination of glycosylation increases homogeneity of the product obtainable in recombinant production.

[0383] In one embodiment, the cytokine of the multispecific or multifunctional polypeptide is IL-2. In a specific embodiment, the IL-2 cytokine can elicit one or more of the cellular responses selected from the group consisting of: proliferation in an activated T lymphocyte cell, differentiation in an activated T lymphocyte cell, cytotoxic T cell (CTL) activity, proliferation in an activated B cell, differentiation in an activated B cell, proliferation in a natural killer (NK) cell, differentiation in a NK cell, cytokine secretion by an activated T cell or an NK cell, and NK/lymphocyte activated killer (LAK) antitumor cytotoxicity. In another particular embodiment the IL-2 cytokine is a mutant IL-2 cytokine having reduced binding affinity to the .alpha.-subunit of the IL-2 receptor. Together with the .beta.- and .gamma.-subunits (also known as CD122 and CD132, respectively), the .alpha.-subunit (also known as CD25) forms the heterotrimeric high-affinity IL-2 receptor, while the dimeric receptor consisting only of the β- and γ-subunits is termed the intermediate-affinity IL-2 receptor. As described in PCT patent application number PCT/EP2012/051991, which is incorporated herein by reference in its entirety, a mutant IL-2 polypeptide with reduced binding to the .alpha.-subunit of the IL-2 receptor has a reduced ability to induce IL-2 signaling in regulatory T cells, induces less activation-induced cell death (AICD) in T cells, and has a reduced toxicity profile in vivo, compared to a wild-type IL-2 polypeptide. The use of such a cytokine with reduced toxicity is particularly advantageous in a multispecific or multifunctional polypeptide according to the invention, having a long serum half-life due to the presence of an Fc domain. In one embodiment, the mutant IL-2 cytokine of the multispecific or multifunctional polypeptide according to the invention comprises at least one amino acid mutation that reduces or abolishes the affinity of the mutant IL-2 cytokine to the .alpha.-subunit of the IL-2 receptor (CD25) but preserves the affinity of the mutant IL-2 cytokine to the intermediate-affinity IL-2 receptor (consisting of the β and γ subunits of the IL-2 receptor), compared to the non-mutated IL-2 cytokine. In one embodiment the one or more amino acid mutations are amino acid substitutions. In a specific embodiment, the mutant IL-2 cytokine comprises one, two or three amino acid substitutions at one, two or three position(s) selected from the positions corresponding to residue 42, 45, and 72 of human IL-2. In a more specific embodiment, the mutant IL-2 cytokine comprises three amino acid substitutions at the positions corresponding to residue 42, 45 and 72 of human IL-2. In an even more specific embodiment, the mutant IL-2 cytokine is human IL-2 comprising the amino acid substitutions F42A, Y45A and L72G. In one embodiment the mutant IL-2 cytokine additionally comprises an amino acid mutation at a position corresponding to position 3 of human IL-2, which eliminates the O-glycosylation site of IL-2. Particularly, said additional amino acid mutation is an amino acid substitution replacing a threonine residue by an alanine residue. A particular mutant IL-2 cytokine useful in the invention comprises four amino acid substitutions at positions corresponding to residues 3, 42, 45 and 72 of human IL-2. Specific amino acid substitutions are T3A, F42A, Y45A and L72G. As demonstrated in PCT patent application number PCT/EP2012/051991 and in the appended Examples, said quadruple mutant IL-2 polypeptide (IL-2 qm) exhibits no detectable binding to CD25, reduced ability to induce apoptosis in T cells, reduced ability to induce IL-2 signaling in T.sub.reg cells, and a reduced toxicity profile in vivo. However, it retains ability to activate IL-2 signaling in effector cells, to induce proliferation of effector cells, and to generate IFN-γ as a secondary cytokine by NK cells.

[0384] The IL-2 or mutant IL-2 cytokine according to any of the above embodiments may comprise additional mutations that provide further advantages such as increased expression or stability. For example, the cysteine at position 125 may be replaced with a neutral amino acid such as alanine, to avoid the formation of disulfide-bridged IL-2 dimers. Thus, in certain embodiments the IL-2 or mutant IL-2 cytokine of the multispecific or multifunctional polypeptide according to the invention comprises an additional amino acid mutation at a position corresponding to residue 125 of human IL-2. In one embodiment said additional amino acid mutation is the amino acid substitution C125A.

[0385] In a specific embodiment the IL-2 cytokine of the multispecific or multifunctional polypeptide comprises the polypeptide sequence of SEQ ID NO: 7227 [APTSSSTKKTQLQLEHLLLDLQMILNGINNYKNPKLTRMLTFKFYMPKKATELKHLQCLEEE LKPLEEVLNLAQSKNFHLRPRDLISNINVIVLELKGSETTFMCEYADETATIVEFLNRWITFAQ SIISTLT]. In another specific embodiment the IL-2 cytokine of the multispecific or multifunctional polypeptide comprises the polypeptide sequence of SEQ ID NO: 7228 [APASSSTKKT QLQLEHLLLD LQMILNGINN YKNPKLTRMLTAKFAMPKKATELKHLQCLE EELKPLEEVLNGAQSKNFHL RPRDLISNIN VIVLELKGSETTFMCEYADETATIVEFLNRWITFAQSIISTLT].

[0386] In another embodiment the cytokine of the multispecific or multifunctional polypeptide is IL-12. In a specific embodiment said IL-12 cytokine is a single chain IL-12 cytokine. In an even more specific embodiment the single chain IL-12 cytokine comprises the polypeptide sequence of SEQ ID NO: 7229 [IWELKKDVYVVELDWYPDAPGEMVVLTCDTPEEDGITWTLDQSSEVLGSGKTLTIQVKEFG DAGQYTCHKGGEVLSHSLLLLHKKEDGIWSTDILKDQKEPKNKTFLRCEAKNYSGRFTCWW LTTISTDLTFSVKSSRGSSDPQGVTCGAATLSAERVRGDNKEYEYSVECQEDSACPAAEESLPI EVMVDAVHKLKYENYTSSFFIRDIIKPDPPKNLQLKPLKNSRQVEVSWEYPDTWSTPHSYFSL TFCVQVQGKSKREKKDRVFTDKTSATVICRKNASISVRAQDRYYSSSWSEWASVPCSGGGGS GGGGSGGGGSRNLPVATPDPGMFPCLHHSQNLLRAVSNMLQKARQTLEFYPCTSEEIDHEDI TKDKTSTVEACLPLELTKNESCLNSRETSFITNGSCLASRKTSFMMALCLSSIYEDLKMYQVE FKTMNAKLLMDPKRQIFLDQNMLAVIDELMQALNFNSETVPQKSSLEEPDFYKTKIKLCILLH AFRIRAVTIDRVMSYLNAS]. In one embodiment, the IL-12 cytokine can elicit one or more of the cellular responses selected from the group consisting of: proliferation in a NK cell, differentiation in a NK cell, proliferation in a T cell, and differentiation in a T cell.

[0387] In another embodiment the cytokine of the multispecific or multifunctional polypeptide is IL-10. In a specific embodiment said IL-10 cytokine is a single chain IL-10 cytokine. In an even more specific embodiment the single chain IL-10 cytokine comprises the polypeptide sequence of SEQ ID NO: 7230 [SPGQGTQSENSCTHFPGNLPNMLRDLRDAFSRVKTFFQMKDQLDNLLLKESLLEDFKGYLG CQALSEMIQFYLEEVMPQAENQDPDIKAHVNSLGENLKTLRLRLRRCHRFLPCENKSKAVEQ VKNAFNKLQEKGIYKAMSEFDIFINYIEAYMTMKIRNGGGGSGGGGSGGGGSGGGGSSPGQ GTQSENSCTHFPGNLPNMLRDLRDAFSRVKTFFQMKDQLDNLLLKESLLEDFKGYLGCQALS EMIQFYLEEVMPQAENQDPDIKAHVNSLGENLKTLRLRLRRCHRFLPCENKSKAVEQVKNAF NKLQEKGIYKAMSEFDIFINYIEAYMTMKIRN]. In another specific embodiment the IL-10 cytokine is a monomeric IL-10 cytokine. In a more specific embodiment the monomeric IL-10 cytokine comprises the polypeptide sequence of SEQ ID NO: 7231 [SPGQGTQSENSCTHFPGNLPNMLRDLRDAFSRVKTFFQMKDQLDNLLLKESLLEDFKGYLG CQALSEMIQFYLEEVMPQAENQDPDIKAHVNSLGENLKTLRLRLRRCHRFLPCENGGGSGGK SKAVEQVKNAFNKLQEKGIYKAMSEFDIFINYIEAYMTMKIRN]. In one embodiment, the IL-10 cytokine can elicit one or more of the cellular responses selected from the group consisting of: inhibition of cytokine secretion, inhibition of antigen presentation by antigen presenting cells, reduction of oxygen radical release, and inhibition of T cell proliferation. A multispecific or multifunctional polypeptide according to the invention wherein the cytokine is IL-10 is particularly useful for downregulation of inflammation, e.g. in the treatment of an inflammatory disorder.

[0388] In another embodiment, the cytokine of the multispecific or multifunctional polypeptide is IL-15. In a specific embodiment said IL-15 cytokine is a mutant IL-15 cytokine having reduced binding affinity to the α-subunit of the IL-15 receptor. Without wishing to be bound by theory, a mutant IL-15 polypeptide with reduced binding to the .alpha.-subunit of the IL-15 receptor has a reduced ability to bind to fibroblasts throughout the body, resulting in improved pharmacokinetics and toxicity profile, compared to a wild-type IL-15 polypeptide. The use of a cytokine with reduced toxicity, such as the described mutant IL-2 and mutant IL-15 effector moieties, is particularly advantageous in a multispecific or multifunctional polypeptide according to the invention, having a long serum half-life due to the presence of an Fc domain. In one embodiment the mutant IL-15 cytokine of the multispecific or multifunctional polypeptide according to the invention comprises at least one amino acid mutation that reduces or abolishes the affinity of the mutant IL-15 cytokine to the .alpha.-subunit of the IL-15 receptor but preserves the affinity of the mutant IL-15 cytokine to the intermediate-affinity IL-15/IL-2 receptor (consisting of the .beta.- and .gamma.-subunits of the IL-15/IL-2 receptor), compared to the non-mutated IL-15 cytokine. In one embodiment the amino acid mutation is an amino acid substitution. In a specific embodiment, the mutant IL-15 cytokine comprises an amino acid substitution at the position corresponding to residue 53 of human IL-15. In a more specific embodiment, the mutant IL-15 cytokine is human IL-15 comprising the amino acid substitution E53A. In one embodiment the mutant IL-15 cytokine additionally comprises an amino acid mutation at a position corresponding to position 79 of human IL-15, which eliminates the N-glycosylation site of IL-15. Particularly, said additional amino acid mutation is an amino acid substitution replacing an asparagine residue by an alanine residue. In an even more specific embodiment the IL-15 cytokine comprises the polypeptide sequence of SEQ ID NO: 7232 [NWVNVISDLKKIEDLIQSMHIDATLYTESDVHPSCKVTAMKCFLLELQVISLASGDASIHDTV ENLIILANNSLSSNGAVTESGCKECEELEEKNIKEFLQSFVHIVQMFINTS]. In one embodiment, the IL-15 cytokine can elicit one or more of the cellular responses selected from the group consisting of: proliferation in an activated T lymphocyte cell, differentiation in an activated T lymphocyte cell, cytotoxic T cell (CTL) activity, proliferation in an activated B cell, differentiation in an activated B cell, proliferation in a natural killer (NK) cell, differentiation in a NK cell, cytokine secretion by an activated T cell or an NK cell, and NK/lymphocyte activated killer (LAK) antitumor cytotoxicity.

[0389] Mutant cytokine molecules useful as effector moieties in the multispecific or multifunctional polypeptide can be prepared by deletion, substitution, insertion or modification using genetic or chemical methods well known in the art. Genetic methods may include site-specific mutagenesis of the encoding DNA sequence, PCR, gene synthesis, and the like. The correct nucleotide changes can be verified for example by sequencing. Substitution or insertion may involve natural as well as non-natural amino acid residues. Amino acid modification includes well known methods of chemical modification such as the addition or removal of glycosylation sites or carbohydrate attachments, and the like.

[0390] In one embodiment, the cytokine, particularly a single-chain cytokine, of the multispecific or multifunctional polypeptide is GM-CSF. In a specific embodiment, the GM-CSF cytokine can elicit proliferation and/or differentiation in a granulocyte, a monocyte or a dendritic cell. In one embodiment, the cytokine, particularly a single-chain cytokine, of the multispecific or multifunctional polypeptide is IFN-α. In a specific embodiment, the IFN-α cytokine can elicit one or more of the cellular responses selected from the group consisting of inhibiting viral replication in a virus-infected cell, and upregulating the expression of major histocompatibility complex I (MHC I). In another specific embodiment, the IFN-α cytokine can inhibit proliferation in a tumor cell. In one embodiment the cytokine, particularly a single-chain cytokine, of the multispecific or multifunctional polypeptide is IFNγ. In a specific embodiment, the IFN-γ cytokine can elicit one or more of the cellular responses selected from the group of increased macrophage activity, increased expression of MHC molecules, and increased NK cell activity. In one embodiment the cytokine, particularly a single-chain cytokine, of the multispecific or multifunctional polypeptide is IL-7. In a specific embodiment, the IL-7 cytokine can elicit proliferation of T and/or B lymphocytes. In one embodiment, the cytokine, particularly a single-chain cytokine, of the multispecific or multifunctional polypeptide is IL-8. In a specific embodiment, the IL-8 cytokine can elicit chemotaxis in neutrophils. In one embodiment, the cytokine, particularly a single-chain cytokine, of the multispecific or multifunctional polypeptide, is MIP-1α. In a specific embodiment, the MIP-1α cytokine can elicit chemotaxis in monocytes and T lymphocyte cells. In one embodiment, the cytokine, particularly a single-chain cytokine, of the multispecific or multifunctional polypeptide is MIP-1β. In a specific embodiment, the MIP-1β cytokine can elicit chemotaxis in monocytes and T lymphocyte cells. In one embodiment, the cytokine, particularly a single-chain cytokine, of the multispecific or multifunctional polypeptide is TGF-β . In a specific embodiment, the TGF-β cytokine can elicit one or more of the cellular responses selected from the group consisting of chemotaxis in monocytes, chemotaxis in macrophages, upregulation of IL-1 expression in activated macrophages, and upregulation of IgA expression in activated B cells.

[0391] In one embodiment, the multispecific or multifunctional polypeptide of the invention binds to an cytokine receptor with a dissociation constant (K_{D}) that is at least about 1, 1.5, 2, 2.5, 3, 3.5, 4, 4.5, 5, 5.5, 6, 6.5, 7, 7.5, 8, 8.5, 9, 9.5 or 10 times greater than that for a control cytokine. In another embodiment, the multispecific or multifunctional polypeptide binds to a cytokine receptor with a K_{D} that is at least 2, 3, 4, 5, 6, 7, 8, 9, or 10 times greater than that for a corresponding multispecific or multifunctional polypeptide comprising two or more effector moieties. In another embodiment, the multispecific or multifunctional polypeptide binds to a cytokine receptor with a dissociation constant K_{D} that is about 10 times greater than that for a corresponding the multispecific or multifunctional polypeptide comprising two or more cytokines.

[0392] In some embodiments, the multispecific molecules disclosed herein include a cytokine molecule. In embodiments, the cytokine molecule includes a full length, a fragment or a variant of a cytokine; a cytokine receptor domain, e.g., a cytokine receptor dimerizing domain; or an agonist of a cytokine receptor, e.g., an antibody molecule (e.g., an agonistic antibody) to a cytokine receptor.

[0393] In some embodiments the cytokine molecule is chosen from IL-2, IL-12, IL-15, IL-18, IL-7, IL-21, or interferon gamma, or a fragment or variant thereof, or a combination of any of the aforesaid cytokines. The cytokine molecule can be a monomer or a dimer. In embodiments, the cytokine molecule can further include a cytokine receptor dimerizing domain.

[0394] In other embodiments, the cytokine molecule is an agonist of a cytokine receptor, e.g., an antibody molecule (e.g., an agonistic antibody) to a cytokine receptor chosen from an IL-15Ra or IL-21R.

[0395] In one embodiment, the cytokine molecule is IL-15, e.g., human IL-15 (e.g., comprising the amino acid sequence:

(SEQ ID NO: 7017)
NWVNVISDLKKIEDLIQSMHIDATLYTESDVHPSCKVTAM
KCFLLELQVISLESGDASIHDTVENLIILANNSLSSNGNV
TESGCKECEELEEKNIKEFLQSFVHIVQMFINTS,

a fragment thereof, or an amino acid sequence substantially identical thereto (e.g., 95% to 99.9% identical thereto, or having at least one amino acid alteration, but not more than five, ten or fifteen alterations (e.g., substitutions, deletions, or insertions, e.g., conservative substitutions) to the amino acid sequence of SEQ ID NO: 7017.

[0396] In some embodiments, the cytokine molecule comprises a receptor dimerizing domain, e.g., an IL15Ralpha dimerizing domain. In one embodiment, the IL15Ralpha dimerizing domain comprises the amino acid sequence: MAPRRARGCRTLGLPALLLLLLLRPPATRGITCPPPMSVEHADIWVKSYSLYSRERYICNSGF KRKAGTSSLTECVL (SEQ ID NO: 7018), a fragment thereof, or an amino acid sequence substantially identical thereto (e.g., 95% to 99.9% identical thereto, or having at least one amino acid alteration, but not more than five, ten or fifteen alterations (e.g., substitutions, deletions, or insertions, e.g., conservative substitutions) to the amino acid sequence of SEQ ID NO: 7018. In some embodiments, the cytokine molecule (e.g., IL-15) and the receptor dimerizing domain (e.g., an IL15Ralpha dimerizing domain) of the multispecific molecule are covalently linked, e.g., via a linker (e.g., a Gly-Ser linker, e.g., a linker comprising the amino acid sequence SGGSGGGGSGGGSGGGGSLQ (SEQ ID NO: 7019). In other embodiments, the cytokine molecule (e.g., IL-15) and the receptor dimerizing domain (e.g., an IL15Ralpha dimerizing domain) of the multispecific molecule are not covalently linked, e.g., are non-covalently associated.

[0397] In other embodiments, the cytokine molecule is IL-2, e.g., human IL-2 (e.g., comprising the amino acid sequence: APTSSSTKKTQLQLEHLLLDLQMILNGINNYKNPKLTRMLTFKFYMPKKATELKHLQCLEEE LKPLEEVLNLAQSKNFHLRPRDLISNINVIVLELKGSETTFMCEYADETATIVEFLNRWITFCQ SIISTLT (SEQ ID NO: 7020), a fragment thereof, or an amino acid sequence substantially identical thereto (e.g., 95% to 99.9% identical thereto, or having at least one amino acid alteration, but not more than five, ten or fifteen alterations (e.g., substitutions, deletions, or insertions, e.g., conservative substitutions) to the amino acid sequence of SEQ ID NO: 7020).

[0398] In other embodiments, the cytokine molecule is IL-18, e.g., human IL-18 (e.g., comprising the amino acid sequence: YFGKLESKLSVIRNLNDQVLFIDQGNRPLFEDMTDSDCRDNAPRTIFIISMYKDSQPRGMAVTI SVKCEKISTLSCENKIISFKEMNPPDNIKDTKSDIIFFQRSVPGHDNKMQFESSSYEGYFLACEK ERDLFKLILKKEDELGDRSIMFTVQNED (SEQ ID NO: 7021), a fragment thereof, or an amino acid sequence substantially identical thereto (e.g., 95% to 99.9% identical thereto, or having at least one amino acid alteration, but not more than five, ten or fifteen alterations (e.g., substitutions, deletions, or insertions, e.g., conservative substitutions) to the amino acid sequence of SEQ ID NO: 7021).

[0399] In other embodiments, the cytokine molecule is IL-21, e.g., human IL-21 (e.g., comprising the amino acid sequence: QGQDRHMIRMRQLIDIVDQLKNYVNDLVPEFLPAPEDVETNCEWSAFSCFQKAQLKSANTG NNERIINVSIKKLKRKPPSTNAGRRQKHRLTCPSCDSYEKKPPKEFLERFKSLLQKMIHQHLSS RTHGSEDS (SEQ ID NO: 7022), a fragment thereof, or an amino acid sequence substantially identical thereto (e.g., 95% to 99.9% identical thereto, or having at least one amino acid alteration, but not more than five, ten or fifteen alterations (e.g., substitutions, deletions, or insertions, e.g., conservative substitutions) to the amino acid sequence of SEQ ID NO: 7022).

[0400] In yet other embodiments, the cytokine molecule is interferon gamma, e.g., human interferon gamma (e.g., comprising the amino acid sequence: QDPYVKEAENLKKYFNAGHSDVADNGTLFLGILKNWKEESDRKIMQSQIVSFYFKLFKNFKD DQSIQKSVETIKEDMNVKFFNSNKKKRDDFEKLTNYSVTDLNVQRKAIHELIQVMAELSPAA KTGKRKRSQMLFRG (SEQ ID NO: 7023), a fragment thereof, or an amino acid sequence substantially identical thereto (e.g., 95% to 99.9% identical thereto, or having at least one amino acid alteration, but not more than five, ten or fifteen alterations (e.g., substitutions, deletions, or insertions, e.g., conservative substitutions) to the amino acid sequence of SEQ ID NO: 7023).

### TGF-Beta Inhibitors

[0401] The present disclosure further provides, inter alia, multispecific (e.g., bi-, tri-, quad-specific) or multifunctional molecules, that include, e.g., are engineered to contain, one or more cytokine inhibitor molecules, e.g., inhibitors of immunomodulatory (e.g., proinflammatory) cytokines and variants, e.g., functional variants, thereof. Accordingly, in some embodiments, the cytokine inhibitor molecule is a TGF-beta inhibitor. In some embodiments, the TGF-beta inhibitor binds to and inhibits TGF-beta, e.g., reduces the activity of TGF-beta. In some embodiments, the TGF-beta inhibitor inhibits (e.g., reduces the activity of) TGF-beta 1. In some embodiments, the TGF-beta inhibitor inhibits (e.g., reduces the activity of) TGF-beta 2. In some embodiments, the TGF-beta inhibitor inhibits (e.g., reduces the activity of) TGF-beta 3. In some embodiments, the TGF-beta inhibitor inhibits (e.g., reduces the activity of) TGF-beta 1 and TGF-beta 3. In some embodiments, the TGF-beta inhibitor inhibits (e.g., reduces the activity of) TGF-beta 1, TGF-beta 2, and TGF-beta 3.

[0402] In some embodiments, the TGF-beta inhibitor comprises a portion of a TGF-beta receptor (e.g., an extracellular domain of a TGF-beta receptor) that is capable of inhibiting (e.g., reducing the activity of) TGF-beta, or functional fragment or variant thereof. In some embodiments, the TGF-beta inhibitor comprises a TGFBR1 polypeptide (e.g., an extracellular domain of TGFBR1 or functional variant thereof). In some embodiments, the TGF-beta inhibitor comprises a TGFBR2 polypeptide (e.g., an extracellular domain of TGFBR2 or functional variant thereof). In some embodiments, the TGF-beta inhibitor comprises a TGFBR3 polypeptide (e.g., an extracellular domain of TGFBR3 or functional variant thereof). In some embodiments, the TGF-beta inhibitor comprises a TGFBR1 polypeptide (e.g., an extracellular domain of TGFBR1 or functional variant thereof) and a TGFBR2 polypeptide (e.g., an extracellular domain of TGFBR2 or functional variant thereof). In some embodiments, the TGF-beta inhibitor comprises a TGFBR1 polypeptide (e.g., an extracellular domain of TGFBR1 or functional variant thereof) and a TGFBR3 polypeptide (e.g., an extracellular domain of TGFBR3 or functional variant thereof). In some embodiments, the TGF-beta inhibitor comprises a TGFBR2 polypeptide (e.g., an extracellular domain of TGFBR2 or functional variant thereof) and a TGFBR3 polypeptide (e.g., an extracellular domain of TGFBR3 or functional variant thereof).

[0403] Exemplary TGF-beta receptor polypeptides that can be used as TGF-beta inhibitors have been disclosed in U.S. Pat. Nos. 8,993,524, 9,676,863, 8,658,135, US20150056199, US20070184052, and WO2017037634, all of which are herein incorporated by reference in their entirety.

[0404] In some embodiments, the TGF-beta inhibitor comprises an extracellular domain of TGFBR1 or a sequence substantially identical thereto (e.g., a sequence that is at least 80%, 85%, 90%, or 95% identical thereto). In some embodiments, the TGF-beta inhibitor comprises an extracellular domain of SEQ ID NO: 95, or a sequence substantially identical thereto (e.g., a sequence that is at least 80%, 85%, 90%, or 95% identical thereto). In some embodiments, the TGF-beta inhibitor comprises an extracellular domain of SEQ ID NO: 96, or a sequence substantially identical thereto (e.g., a sequence that is at least 80%, 85%, 90%, or 95% identical thereto). In some embodiments, the TGF-beta inhibitor comprises an extracellular domain of SEQ ID NO: 97, or a sequence substantially identical thereto (e.g., a sequence that is at least 80%, 85%, 90%, or 95% identical thereto). In some embodiments, the TGF-beta inhibitor comprises the amino acid sequence of SEQ ID NO: 104, or a sequence substantially identical thereto (e.g., a sequence that is at least 80%, 85%, 90%, or 95% identical thereto). In some embodiments, the TGF-beta inhibitor comprises the amino acid sequence of SEQ ID NO: 105, or a sequence substantially identical thereto (e.g., a sequence that is at least 80%, 85%, 90%, or 95% identical thereto).

[0405] In some embodiments, the TGF-beta inhibitor comprises an extracellular domain of TGFBR2 or a sequence substantially identical thereto (e.g., a sequence that is at least 80%, 85%, 90%, or 95% identical thereto). In some embodiments, the TGF-beta inhibitor comprises an extracellular domain of SEQ ID NO: 98, or a sequence substantially identical thereto (e.g., a sequence that is at least 80%, 85%, 90%, or 95% identical thereto). In some embodiments, the TGF-beta inhibitor comprises an extracellular domain of SEQ ID NO: 99, or a sequence substantially identical thereto (e.g., a sequence that is at least 80%, 85%, 90%, or 95% identical thereto). In some embodiments, the TGF-beta inhibitor comprises the amino acid sequence of SEQ ID NO: 100, or a sequence substantially identical thereto (e.g., a sequence that is at least 80%, 85%, 90%, or 95% identical thereto). In some embodiments, the TGF-beta inhibitor comprises the amino acid sequence of SEQ ID NO: 101, or a sequence substantially identical thereto (e.g., a sequence that is at least 80%, 85%, 90%, or 95% identical thereto). In some embodiments, the TGF-beta inhibitor comprises the amino acid sequence of SEQ ID NO: 102, or a sequence substantially identical thereto (e.g., a sequence that is at least 80%, 85%, 90%, or 95% identical thereto). In some embodiments, the TGF-beta inhibitor comprises the amino acid sequence of SEQ ID NO: 103, or a sequence substantially identical thereto (e.g., a sequence that is at least 80%, 85%, 90%, or 95% identical thereto).

[0406] In some embodiments, the TGF-beta inhibitor comprises an extracellular domain of TGFBR3 or a sequence substantially identical thereto (e.g., a sequence that is at least 80%, 85%, 90%, or 95% identical thereto). In some embodiments, the TGF-beta inhibitor comprises an extracellular domain of SEQ ID NO: 106, or a sequence substantially identical thereto (e.g., a sequence that is at least 80%, 85%, 90%, or 95% identical thereto). In some embodiments, the TGF-beta inhibitor comprises an extracellular domain of SEQ ID NO: 107, or a sequence substantially identical thereto (e.g., a sequence that is at least 80%, 85%, 90%, or 95% identical thereto). In some embodiments, the TGF-beta inhibitor comprises the amino acid sequence of SEQ ID NO: 108, or a sequence substantially identical thereto (e.g., a sequence that is at least 80%, 85%, 90%, or 95% identical thereto).

[0407] In some embodiments, the TGF-beta inhibitor comprises no more than one TGF-beta receptor extracellular domain. In some embodiments, the TGF-beta inhibitor comprises two or more (e.g., two, three, four, five, or more) TGF-beta receptor extracellular domains, linked together, e.g., via a linker.

TABLE 16
Exemplary amino acid sequences of TGF-beta polypeptides or
TGF-beta receptor polypeptides

| SEQ | | |
|---|---|---|
| ID NO | Description | Amino acid sequence |
| SEQ | Immature | MPPSGLRLLLLLLPLLWLLVLTPGRPAAGLSTCKTIDMELVKRK |
| ID NO: | human TGF- | RIEAIRGQILSKLRLASPPSQGEVPPGPLPEAVLALYNSTRDRVA |
| 92 | beta 1 | GESAEPEPEPEADYYAKEVTRVLMVETHNEIYDKFKQSTHSIYM |
| | (P01137-1) | FFNTSELREAVPEPVLLSRAELRLLRLKLKVEQHVELYQKYSNN |
| | | SWRYLSNRLLAPSDSPEWLSFDVTGVVRQWLSRGGEIEGFRLSA |
| | | HCSCDSRDNTLQVDINGFTTGRRGDLATIHGMNRPFLLLMATPL |
| | | ERAQHLQSSRHRRALDTNYCFSSTEKNCCVRQLYIDFRKDLGW |
| | | KWIHEPKGYHANFCLGPCPYIWSLDTQYSKVLALYNQHNPGAS |
| | | AAPCCVPQALEPLPIVYYVGRKPKVEQLSNMIVRSCKCS |
| SEQ | Human TGF- | LSTCKTIDMELVKRKRIEAIRGQILSKLRLASPPSQGEVPPGPLPE |
| ID NO: | beta 1 | AVLALYNSTRDRVAGESAEPEPEPEADYYAKEVTRVLMVETHN |
| 117 | (P01137-1) | EIYDKFKQSTHSIYMFFNTSELREAVPEPVLLSRAELRLLRLKLK |
| | | VEQHVELYQKYSNNSWRYLSNRLLAPSDSPEWLSFDVTGVVRQ |
| | | WLSRGGEIEGFRLSAHCSCDSRDNTLQVDINGFTTGRRGDLATI |
| | | HGMNRPFLLLMATPLERAQHLQSSRHRRALDTNYCFSSTEKNC |
| | | CVRQLYIDFRKDLGWKWIHEPKGYHANFCLGPCPYIWSLDTQY |
| | | SKVLALYNQHNPGASAAPCCVPQALEPLPIVYYVGRKPKVEQLS |
| | | NMIVRSCKCS |
| SEQ | Immature | MHYCVLSAFLILHLVTVALSLSTCSTLDMDQFMRKRIEAIRGQIL |
| ID NO: | human TGF- | SKLKLTSPPEDYPEPEEVPPEVISIYNSTRDLLQEKASRRAAACER |
| 93 | beta 2 | ERSDEEYYAKEVYKIDMPPFFPSENAIPPTFYRPYFRIVRFDVSA |
| | (P61812-1) | MEKNASNLVKAEFRVFRLQNPKARVPEQRIELYQILKSKDLTSP |
| | | TORYIDSKVVKTRAEGEWLSFDVTDAVHEWLHHKDRNLGFKIS |
| | | LHCPCCTFVPSNNYIIPNKSEELEARFAGIDGTSTYTSGDQKTIKS |
| | | TRKKNSGKTPHLLLMLLPSYRLESQQTNRRKKRALDAAYCFRN |
| | | VQDNCCLRPLYIDFKRDLGWKWIHEPKGYNANFCAGACPYLW |
| | | SSDTQHSRVLSLYNTINPEASASPCCVSQDLEPLTILYYIGKTPKI |
| | | EQLSNMIVKSCKCS |
| SEQ | Human TGF- | LSTCSTLDMDQFMRKRIEAIRGQILSKLKLTSPPEDYPEPEEVPPE |
| ID NO: | beta 2 | VISIYNSTRDLLQEKASRRAAACERERSDEEYYAKEVYKIDMPP |
| 118 | (P61812-1) | FFPSENAIPPTFYRPYFRIVRFDVSAMEKNASNLVKAEFRVFRLQ |
| | | NPKARVPEQRIELYQILKSKDLTSPTQRYIDSKVVKTRAEGEWLS |
| | | FDVTDAVHEWLHHKDRNLGFKISLHCPCCTFVPSNNYIIPNKSEE |
| | | LEARFAGIDGTSTYTSGDQKTIKSTRKKNSGKTPHLLLMLLPSYR |
| | | LESQQTNRRKKRALDAAYCFRNVQDNCCLRPLYIDFKRDLGWK |
| | | WIHEPKGYNANFCAGACPYLWSSDTQHSRVLSLYNTINPEASAS |
| | | PCCVSQDLEPLTILYYIGKTPKIEQLSNMIVKSCKCS |
| SEQ | Immature | MKMHLQRALVVLALLNFATVSLSLSTCTTLDFGHIKKKRVEAIR |
| ID NO: | human TGF- | GQILSKLRLTSPPEPTVMTHVPYQVLALYNSTRELLEEMHGERE |
| 94 | beta 3 | EGCTQENTESEYYAKEIHKFDMIQGLAEHNELAVCPKGITSKVF |
| | (P10600-1) | RFNVSSVEKNRTNLFRAEFRVLRVPNPSSKRNEQRIELFQILRPD |
| | | EHIAKQRYIGGKNLPTRGTAEWLSFDVTDTVREWLLRRESNLGL |
| | | EISIHCPCHTFQPNGDILENIHEVMEIKFKGVDNEDDHGRGDLGR |
| | | LKKQKDHHNPHLILMMIPPHRLDNPGQGGQRKKRALDTNYCFR |
| | | NLEENCCVRPLYIDFRQDLGWKWVHEPKGYYANFCSGPCPYLR |
| | | SADTTHSTVLGLYNTLNPEASASPCCVPQDLEPLTILYYVGRTPK |
| | | VEQLSNMVVKSCKCS |
| SEQ | Human TGF- | LSTCTTLDFGHIKKKRVEAIRGQILSKLRLTSPPEPTVMTHVPYQ |
| ID NO: | beta 3 | VLALYNSTRELLEEMHGEREEGCTQENTESEYYAKEIHKFDMIQ |
| 119 | (P10600-1) | GLAEHNELAVCPKGITSKVFRFNVSSVEKNRTNLFRAEFRVLRV |
| | | PNPSSKRNEQRIELFQILRPDEHIAKQRYIGGKNLPTRGTAEWLS |
| | | FDVTDTVREWLLRRESNLGLEISIHCPCHTFQPNGDILENIHEVM |
| | | EIKFKGVDNEDDHGRGDLGRLKKQKDHHNPHLILMMIPPHRLD |
| | | NPGQGGQRKKRALDTNYCFRNLEENCCVRPLYIDFRQDLGWK |
| | | WVHEPKGYYANFCSGPCPYLRSADTTHSTVLGLYNTLNPEASA |
| | | SPCCVPQDLEPLTILYYVGRTPKVEQLSNMVVKSCKCS |
| SEQ | Immature | MEAAVAAPRPRLLLLVLAAAAAAAAALLPGATALQCFCHLCTK |
| ID NO: | human | DNFTCVTDGLCFVSVTETTDKVIHNSMCIAEIDLIPRDRPFVCAP |
| 95 | TGFBR1 | SSKTGSVTTTYCCNQDHCNKIELPTTVKSSPGLGPVELAAVIAGP |
| | isoform 1 | VCFVCISLMLMVYICHNRTVIHHRVPNEEDPSLDRPFISEGTTLK |
| | (P36897-1) | DLIYDMTTSGSGSGLPLLVQRTIARTIVLQESIGKGRFGEVWRGK |
| | | WRGEEVAVKIFSSREERSWFREAEIYQTVMLRHENILGFIAADN |
| | | KDNGTWTQLWLVSDYHEHGSLFDYLNRYTVTVEGMIKLALST |
| | | ASGLAHLHMEIVGTQGKPAIAHRDLKSKNILVKKNGTCCIADLG |
| | | LAVRHDSATDTIDIAPNHRVGTKRYMAPEVLDDSINMKHFESFK |
| | | RADIYAMGLVFWEIARRCSIGGIHEDYQLPYYDLVPSDPSVEEM |
| | | RKVVCEQKLRPNIPNRWQSCEALRVMAKIMRECWYANGAARL |
| | | TALRIKKTLSQLSQQEGIKM |
| SEQ | Human | LQCFCHLCTKDNFTCVTDGLCFVSVTETTDKVIHNSMCIAEIDLI |
| ID NO: | TGFBR1 | PRDRPFVCAPSSKTGSVTTTYCCNQDHCNKIELPTTVKSSPGLGP |
| 120 | isoform 1 | VELAAVIAGPVCFVCISLMLMVYICHNRTVIHHRVPNEEDPSLD |
| | (P36897-1) | RPFISEGTTLKDLIYDMTTSGSGSGLPLLVQRTIARTIVLQESIGK |
| | | GRFGEVWRGKWRGEEVAVKIFSSREERSWFREAEIYQTVMLRH |
| | | ENILGFIAADNKDNGTWTQLWLVSDYHEHGSLFDYLNRYTVTV |
| | | EGMIKLALSTASGLAHLHMEIVGTQGKPAIAHRDLKSKNILVKK |
| | | NGTCCIADLGLAVRHDSATDTIDIAPNHRVGTKRYMAPEVLDDS |
| | | INMKHFESFKRADIYAMGLVFWEIARRCSIGGIHEDYQLPYYDL |
| | | VPSDPSVEEMRKVVCEQKLRPNIPNRWQSCEALRVMAKIMREC |
| | | WYANGAARLTALRIKKTLSQLSQQEGIKM |
| SEQ | Immature | MEAAVAAPRPRLLLLVLAAAAAAAAALLPGATALQCFCHLCTK |
| ID NO: | human | DNFTCVTDGLCFVSVTETTDKVIHNSMCIAEIDLIPRDRPFVCAP |
| 96 | TGFBR1 | SSKTGSVTTTYCCNQDHCNKIELPTTGPFSVKSSPGLGPVELAAV |
| | isoform 2 | IAGPVCFVCISLMLMVYICHNRTVIHHRVPNEEDPSLDRPFISEGT |
| | (P36897-2) | TLKDLIYDMTTSGSGSGLPLLVQRTIARTIVLQESIGKGRFGEVW |
| | | RGKWRGEEVAVKIFSSREERSWFREAEIYQTVMLRHENILGFIA |
| | | ADNKDNGTWTQLWLVSDYHEHGSLFDYLNRYTVTVEGMIKLA |
| | | LSTASGLAHLHMEIVGTQGKPAIAHRDLKSKNILVKKNGTCCIA |
| | | DLGLAVRHDSATDTIDIAPNHRVGTKRYMAPEVLDDSINMKHF |
| | | ESFKRADIYAMGLVFWEIARRCSIGGIHEDYQLPYYDLVPSDPSV |
| | | EEMRKVVCEQKLRPNIPNRWQSCEALRVMAKIMRECWYANGA |
| | | ARLTALRIKKTLSQLSQQEGIKM |
| SEQ | Human | LQCFCHLCTKDNFTCVTDGLCFVSVTETTDKVIHNSMCIAEIDLI |
| ID NO: | TGFBR1 | PRDRPFVCAPSSKTGSVTTTYCCNQDHCNKIELPTTGPFSVKSSP |
| 121 | isoform 2 | GLGPVELAAVIAGPVCFVCISLMLMVYICHNRTVIHHRVPNEED |
| | (P36897-2) | PSLDRPFISEGTTLKDLIYDMTTSGSGSGLPLLVQRTIARTIVLQE |
| | | SIGKGRFGEVWRGKWRGEEVAVKIFSSREERSWFREAEIYQTV |
| | | MLRHENILGFIAADNKDNGTWTQLWLVSDYHEHGSLFDYLNR |
| | | YTVTVEGMIKLALSTASGLAHLHMEIVGTQGKPAIAHRDLKSK |
| | | NILVKKNGTCCIADLGLAVRHDSATDTIDIAPNHRVGTKRYMAP |
| | | EVLDDSINMKHFESFKRADIYAMGLVFWEIARRCSIGGIHEDYQ |
| | | LPYYDLVPSDPSVEEMRKVVCEQKLRPNIPNRWQSCEALRVMA |
| | | KIMRECWYANGAARLTALRIKKTLSQLSQQEGIKM |
| SEQ | Immature | MEAAVAAPRPRLLLLVLAAAAAAAAALLPGATALQCFCHLCTK |
| ID NO: | human | DNFTCVTDGLCFVSVTETTDKVIHNSMCIAEIDLIPRDRPFVCAP |
| 97 | TGFBR1 | SSKTGSVTTTYCCNQDHCNKIELPTTGLPLLVQRTIARTIVLQESI |
| | isoform 3 | GKGRFGEVWRGKWRGEEVAVKIFSSREERSWFREAEIYQTVML |
| | (P36897-3) | RHENILGFIAADNKDNGTWTQLWLVSDYHEHGSLFDYLNRYTV |
| | | TVEGMIKLALSTASGLAHLHMEIVGTQGKPAIAHRDLKSKNILV |
| | | KKNGTCCIADLGLAVRHDSATDTIDIAPNHRVGTKRYMAPEVL |
| | | DDSINMKHFESFKRADIYAMGLVFWEIARRCSIGGIHEDYQLPY |
| | | YDLVPSDPSVEEMRKVVCEQKLRPNIPNRWQSCEALRVMAKIM |
| | | RECWYANGAARLTALRIKKTLSQLSQQEGIKM |
| SEQ | Human | LQCFCHLCTKDNFTCVTDGLCFVSVTETTDKVIHNSMCIAEIDLI |
| ID NO: | TGFBR1 | PRDRPFVCAPSSKTGSVTTTYCCNQDHCNKIELPTTGLPLLVQRT |
| 122 | isoform 3 | IARTIVLQESIGKGRFGEVWRGKWRGEEVAVKIFSSREERSWFR |
| | (P36897-3) | EAEIYQTVMLRHENILGFIAADNKDNGTWTQLWLVSDYHEHGS |
| | | LFDYLNRYTVTVEGMIKLALSTASGLAHLHMEIVGTQGKPAIAH |
| | | RDLKSKNILVKKNGTCCIADLGLAVRHDSATDTIDIAPNHRVGT |
| | | KRYMAPEVLDDSINMKHFESFKRADIYAMGLVFWEIARRCSIGG |
| | | IHEDYQLPYYDLVPSDPSVEEMRKVVCEQKLRPNIPNRWQSCEA |
| | | LRVMAKIMRECWYANGAARLTALRIKKTLSQLSQQEGIKM |
| SEQ | Human | LQCFCHLCTKDNFTCVTDGLCFVSVTETTDKVIHNSMCIAEIDLI |
| ID NO: | TGFBR1 | PRDRPFVCAPSSKTGSVTTTYCCNQDHCNKIELPTTVKSSPGLGP |
| 104 | fragment 1 | VEL |
| SEQ | Human | ALQCFCHLCTKDNFTCVTDGLCFVSVTETTDKVIHNSMCIAEID |
| ID NO: | TGFBR1 | LIPRDRPFVCAPSSKTGSVTTTYCCNQDHCNKIEL |
| 105 | fragment 2 | |
| SEQ | Immature | MGRGLLRGLWPLHIVLWTRIASTIPPHVQKSVNNDMIVTDNNG |
| ID NO: | human | AVKFPQLCKFCDVRFSTCDNQKSCMSNCSITSICEKPQEVCVAV |
| 98 | TGFBR2 | WRKNDENITLETVCHDPKLPYHDFILEDAASPKCIMKEKKKPGE |
| | isoform B | TFFMCSCSSDECNDNIIFSEEYNTSNPDLLLVIFQVTGISLLPPLGV |
| | (short | AISVIIIFYCYRVNRQQKLSSTWETGKTRKLMEFSEHCAIILEDDR |
| | isoform) | SDISSTCANNINHNTELLPIELDTLVGKGRFAEVYKAKLKQNTSE |
| | (P37173-1) | QFETVAVKIFPYEEYASWKTEKDIFSDINLKHENILQFLTAEERK |
| | | TELGKQYWLITAFHAKGNLQEYLTRHVISWEDLRKLGSSLARGI |
| | | AHLHSDHTPCGRPKMPIVHRDLKSSNILVKNDLTCCLCDFGLSL |
| | | RLDPTLSVDDLANSGQVGTARYMAPEVLESRMNLENVESFKQT |
| | | DVYSMALVLWEMTSRCNAVGEVKDYEPPFGSKVREHPCVESM |
| | | KDNVLRDRGRPEIPSFWLNHQGIQMVCETLTECWDHDPEARLT |
| | | AQCVAERFSELEHLDRLSGRSCSEEKIPEDGSLNTTK |
| SEQ | Human | TIPPHVQKSVNNDMIVTDNNGAVKFPQLCKFCDVRFSTCDNQK |
| ID NO: | TGFBR2 | SCMSNCSITSICEKPQEVCVAVWRKNDENITLETVCHDPKLPYH |
| 123 | isoform B | DFILEDAASPKCIMKEKKKPGETFFMCSCSSDECNDNIIFSEEYNT |
| | (short | SNPDLLLVIFQVTGISLLPPLGVAISVIIIFYCYRVNRQQKLSSTWE |
| | isoform) | TGKTRKLMEFSEHCAIILEDDRSDISSTCANNINHNTELLPIELDT |
| | (P37173-1) | LVGKGRFAEVYKAKLKQNTSEQFETVAVKIFPYEEYASWKTEK |
| | | DIFSDINLKHENILQFLTAEERKTELGKQYWLITAFHAKGNLQEY |
| | | LTRHVISWEDLRKLGSSLARGIAHLHSDHTPCGRPKMPIVHRDL |
| | | KSSNILVKNDLTCCLCDFGLSLRLDPTLSVDDLANSGQVGTARY |
| | | MAPEVLESRMNLENVESFKQTDVYSMALVLWEMTSRCNAVGE |
| | | VKDYEPPFGSKVREHPCVESMKDNVLRDRGRPEIPSFWLNHQGI |
| | | QMVCETLTECWDHDPEARLTAQCVAERFSELEHLDRLSGRSCS |
| | | EEKIPEDGSLNTTK |
| SEQ | Immature | MGRGLLRGLWPLHIVLWTRIASTIPPHVQKSDVEMEAQKDEIIC |
| ID NO: | human | PSCNRTAHPLRHINNDMIVTDNNGAVKFPQLCKFCDVRFSTCDN |
| 99 | TGFBR2 | QKSCMSNCSITSICEKPQEVCVAVWRKNDENITLETVCHDPKLP |
| | isoform A | YHDFILEDAASPKCIMKEKKKPGETFFMCSCSSDECNDNIIFSEE |
| | (long isoform) | YNTSNPDLLLVIFQVTGISLLPPLGVAISVIIIFYCYRVNRQQKLSS |
| | (P37173-2) | TWETGKTRKLMEFSEHCAIILEDDRSDISSTCANNINHNTELLPIE |
| | | LDTLVGKGRFAEVYKAKLKQNTSEQFETVAVKIFPYEEYASWK |
| | | TEKDIFSDINLKHENILQFLTAEERKTELGKQYWLITAFHAKGNL |
| | | QEYLTRHVISWEDLRKLGSSLARGIAHLHSDHTPCGRPKMPIVH |
| | | RDLKSSNILVKNDLTCCLCDFGLSLRLDPTLSVDDLANSGQVGT |
| | | ARYMAPEVLESRMNLENVESFKQTDVYSMALVLWEMTSRCNA |
| | | VGEVKDYEPPFGSKVREHPCVESMKDNVLRDRGRPEIPSFWLN |
| | | HQGIQMVCETLTECWDHDPEARLTAQCVAERFSELEHLDRLSG |
| | | RSCSEEKIPEDGSLNTTK |
| SEQ | Human | TIPPHVQKSDVEMEAQKDEIICPSCNRTAHPLRHINNDMIVTDNN |
| ID NO: | TGFBR2 | GAVKFPQLCKFCDVRFSTCDNQKSCMSNCSITSICEKPQEVCVA |
| 124 | isoform A | VWRKNDENITLETVCHDPKLPYHDFILEDAASPKCIMKEKKKPG |
| | (long isoform) | ETFFMCSCSSDECNDNIIFSEEYNTSNPDLLLVIFQVTGISLLPPLG |
| | (P37173-2) | VAISVIIIFYCYRVNRQQKLSSTWETGKTRKLMEFSEHCAIILEDD |
| | | RSDISSTCANNINHNTELLPIELDTLVGKGRFAEVYKAKLKQNTS |
| | | EQFETVAVKIFPYEEYASWKTEKDIFSDINLKHENILQFLTAEER |
| | | KTELGKQYWLITAFHAKGNLQEYLTRHVISWEDLRKLGSSLAR |
| | | GIAHLHSDHTPCGRPKMPIVHRDLKSSNILVKNDLTCCLCDFGLS |
| | | LRLDPTLSVDDLANSGQVGTARYMAPEVLESRMNLENVESFKQ |
| | | TDVYSMALVLWEMTSRCNAVGEVKDYEPPFGSKVREHPCVES |
| | | MKDNVLRDRGRPEIPSFWLNHQGIQMVCETLTECWDHDPEARL |
| | | TAQCVAERFSELEHLDRLSGRSCSEEKIPEDGSLNTTK |
| SEQ | Human | TIPPHVQKSVNNDMIVTDNNGAVKFPQLCKFCDVRFSTCDNQK |
| ID NO: | TGFBR2 | SCMSNCSITSICEKPQEVCVAVWRKNDENITLETVCHDPKLPYH |
| 100 | fragment 1 | DFILEDAASPKCIMKEKKKPGETFFMCSCSSDECNDNIIFSEEYNT |
| | (ECD of | SNPD |
| | human | |
| | TGFBR2 | |
| | isoform B) | |
| SEQ | Human | IPPHVQKSVNNDMIVTDNNGAVKFPQLCKFCDVRFSTCDNQKS |
| ID NO: | TGFBR2 | CMSNCSITSICEKPQEVCVAVWRKNDENITLETVCHDPKLPYHD |
| 101 | fragment 2 | FILEDAASPKCIMKEKKKPGETFFMCSCSSDECNDNIIFSEEYNTS |
| | | NPD |
| SEQ | Human | TIPPHVQKSDVEMEAQKDEIICPSCNRTAHPLRHINNDMIVTDNN |
| ID NO: | TGFBR2 | GAVKFPQLCKFCDVRFSTCDNQKSCMSNCSITSICEKPQEVCVA |
| 102 | fragment 3 | VWRKNDENITLETVCHDPKLPYHDFILEDAASPKCIMKEKKKPG |
| | (ECD of | ETFFMCSCSSDECNDNIIFSEEYNTSNPD |
| | human | |
| | TGFBR2 | |
| | isoform A) | |
| SEQ | Human | QLCKFCDVRFSTCDNQKSCMSNCSITSICEKPQEVCVAVWRKN |
| ID NO: | TGFBR2 | DENITLETVCHDPKLPYHDFILEDAASPKCIMKEKKKPGETFFMC |
| 103 | fragment 4 | SCSSDECNDNIIF |
| SEQ | Immature | MTSHYVIAIFALMSSCLATAGPEPGALCELSPVSASHPVQALME |
| ID NO: | human | SFTVLSGCASRGTTGLPQEVHVLNLRTAGQGPGQLQREVTLHL |
| 106 | TGFBR3 | NPISSVHIHHKSVVFLLNSPHPLVWHLKTERLATGVSRLFLVSEG |
| | isoform 1 | SVVQFSSANFSLTAETEERNFPHGNEHLLNWARKEYGAVTSFTE |
| | (Q03167-1) | LKIARNIYIKVGEDQVFPPKCNIGKNFLSLNYLAEYLQPKAAEGC |
| | | VMSSQPQNEEVHIIELITPNSNPYSAFQVDITIDIRPSQEDLEVVK |
| | | NLILILKCKKSVNWVIKSFDVKGSLKIIAPNSIGFGKESERSMTMT |
| | | KSIRDDIPSTQGNLVKWALDNGYSPITSYTMAPVANRFHLRLEN |
| | | NAEEMGDEEVHTIPPELRILLDPGALPALQNPPIRGGEGQNGGLP |
| | | FPFPDISRRVWNEEGEDGLPRPKDPVIPSIQLFPGLREPEEVQGSV |
| | | DIALSVKCDNEKMIVA VEKDSFQASGYSGMDVTLLDPTCKAKM |
| | | NGTHFVLESPLNGCGTRPRWSALDGVVYYNSIVIQVPALGDSSG |
| | | WPDGYEDLESGDNGFPGDMDEGDASLFTRPEIVVFNCSLQQVR |
| | | NPSSFQEQPHGNITFNMELYNTDLFLVPSQGVFSVPENGHVYVE |
| | | VSVTKAEQELGFAIQTCFISPYSNPDRMSHYTIIENICPKDESVKF |
| | | YSPKRVHFPIPQADMDKKRFSFVFKPVFNTSLLFLQCELTLCTK |
| | | MEKHPQKLPKCVPPDEACTSLDASIIWAMMQNKKTFTKPLAVI |
| | | HHEAESKEKGPSMKEPNPISPPIFHGLDTLTVMGIAFAAFVIGAL |
| | | LTGALWYIYSHTGETAGRQQVPTSPPASENSSAAHSIGSTQSTPC |
| | | SSSSTA |
| SEQ | Human | GPEPGALCELSPVSASHPVQALMESFTVLSGCASRGTTGLPQEV |
| ID NO: | TGFBR3 | HVLNLRTAGQGPGQLQREVTLHLNPISSVHIHHKSVVFLLNSPH |
| 125 | isoform 1 | PLVWHLKTERLATGVSRLFLVSEGSVVQFSSANFSLTAETEERN |
| | (Q03167-1) | FPHGNEHLLNWARKEYGAVTSFTELKIARNIYIKVGEDQVFPPK |
| | | CNIGKNFLSLNYLAEYLQPKAAEGCVMSSQPQNEEVHIIELITPN |
| | | SNPYSAFQVDITIDIRPSQEDLEVVKNLILILKCKKSVNWVIKSFD |
| | | VKGSLKIIAPNSIGFGKESERSMTMTKSIRDDIPSTQGNLVKWAL |
| | | DNGYSPITSYTMAPVANRFHLRLENNAEEMGDEEVHTIPPELRIL |
| | | LDPGALPALQNPPIRGGEGQNGGLPFPFPDISRRVWNEEGEDGLP |
| | | RPKDPVIPSIQLFPGLREPEEVQGSVDIALSVKCDNEKMIVAVEK |
| | | DSFQASGYSGMDVTLLDPTCKAKMNGTHFVLESPLNGCGTRPR |
| | | WSALDGVVYYNSIVIQVPALGDSSGWPDGYEDLESGDNGFPGD |
| | | MDEGDASLFTRPEIVVFNCSLQQVRNPSSFQEQPHGNITFNMEL |
| | | YNTDLFLVPSQGVFSVPENGHVYVEVSVTKAEQELGFAIQTCFIS |
| | | PYSNPDRMSHYTIIENICPKDESVKFYSPKRVHFPIPQADMDKKR |
| | | FSFVFKPVFNTSLLFLQCELTLCTKMEKHPQKLPKCVPPDEACTS |
| | | LDASIIWAMMQNKKTFTKPLAVIHHEAESKEKGPSMKEPNPISPP |
| | | IFHGLDTLTVMGIAFAAFVIGALLTGALWYIYSHTGETAGRQQV |
| | | PTSPPASENSSAAHSIGSTQSTPCSSSSTA |
| SEQ | Immature | MTSHYVIAIFALMSSCLATAGPEPGALCELSPVSASHPVQALME |
| ID NO: | human | SFTVLSGCASRGTTGLPQEVHVLNLRTAGQGPGQLQREVTLHL |
| 107 | TGFBR3 | NPISSVHIHHKSVVFLLNSPHPLVWHLKTERLATGVSRLFLVSEG |
| | isoform 2 | SVVQFSSANFSLTAETEERNFPHGNEHLLNWARKEYGAVTSFTE |
| | (Q03167-2) | LKIARNIYIKVGEDQVFPPKCNIGKNFLSLNYLAEYLQPKAAEGC |
| | | VMSSQPQNEEVHIIELITPNSNPYSAFQVDITIDIRPSQEDLEVVK |
| | | NLILILKCKKSVNWVIKSFDVKGSLKIIAPNSIGFGKESERSMTMT |
| | | KSIRDDIPSTQGNLVKWALDNGYSPITSYTMAPVANRFHLRLEN |
| | | NEEMGDEEVHTIPPELRILLDPGALPALQNPPIRGGEGQNGGLPF |
| | | PFPDISRRVWNEEGEDGLPRPKDPVIPSIQLFPGLREPEEVQGSVD |
| | | IALSVKCDNEKMIVAVEKDSFQASGYSGMDVTLLDPTCKAKMN |
| | | GTHFVLESPLNGCGTRPRWSALDGVVYYNSIVIQVPALGDSSG |
| | | WPDGYEDLESGDNGFPGDMDEGDASLFTRPEIVVFNCSLQQVR |
| | | NPSSFQEQPHGNITFNMELYNTDLFLVPSQGVFSVPENGHVYVE |
| | | VSVTKAEQELGFAIQTCFISPYSNPDRMSHYTIIENICPKDESVKF |
| | | YSPKRVHFPIPQADMDKKRFSFVFKPVFNTSLLFLQCELTLCTK |
| | | MEKHPQKLPKCVPPDEACTSLDASIIWAMMQNKKTFTKPLAVI |
| | | HHEAESKEKGPSMKEPNPISPPIFHGLDTLTVMGIAFAAFVIGAL |
| | | LTGALWYIYSHTGETAGRQQVPTSPPASENSSAAHSIGSTQSTPC |
| | | SSSSTA |
| SEQ | Human | GPEPGALCELSPVSASHPVQALMESFTVLSGCASRGTTGLPQEV |
| ID NO: | TGFBR3 | HVLNLRTAGQGPGQLQREVTLHLNPISSVHIHHKSVVFLLNSPH |
| 126 | isoform 2 | PLVWHLKTERLATGVSRLFLVSEGSVVQFSSANFSLTAETEERN |
| | (Q03167-2) | FPHGNEHLLNWARKEYGAVTSFTELKIARNIYIKVGEDQVFPPK |
| | | CNIGKNFLSLNYLAEYLQPKAAEGCVMSSQPQNEEVHIIELITPN |
| | | SNPYSAFQVDITIDIRPSQEDLEVVKNLILILKCKKSVNWVIKSFD |
| | | VKGSLKIIAPNSIGFGKESERSMTMTKSIRDDIPSTQGNLVKWAL |
| | | DNGYSPITSYTMAPVANRFHLRLENNEEMGDEEVHTIPPELRILL |
| | | DPGALPALQNPPIRGGEGQNGGLPFPFPDISRRVWNEEGEDGLP |
| | | RPKDPVIPSIQLFPGLREPEEVQGSVDIALSVKCDNEKMIVAVEK |
| | | DSFQASGYSGMDVTLLDPTCKAKMNGTHFVLESPLNGCGTRPR |
| | | WSALDGVVYYNSIVIQVPALGDSSGWPDGYEDLESGDNGFPGD |
| | | MDEGDASLFTRPEIVVFNCSLQQVRNPSSFQEQPHGNITFNMEL |
| | | YNTDLFLVPSQGVFSVPENGHVYVEVSVTKAEQELGFAIQTCFIS |
| | | PYSNPDRMSHYTIIENICPKDESVKFYSPKRVHFPIPQADMDKKR |
| | | FSFVFKPVFNTSLLFLQCELTLCTKMEKHPQKLPKCVPPDEACTS |
| | | LDASIIWAMMQNKKTFTKPLA VIHHEAESKEKGPSMKEPNPISPP |
| | | IFHGLDTLTVMGIAFAAFVIGALLTGALWYIYSHTGETAGRQQV |
| | | PTSPPASENSSAAHSIGSTQSTPCSSSSTA |
| SEQ | Human | GPEPGALCELSPVSASHPVQALMESFTVLSGCASRGTTGLPQEV |
| ID NO: | TGFBR3 | HVLNLRTAGQGPGQLQREVTLHLNPISSVHIHHKSVVFLLNSPH |
| 108 | fragment 1 | PLVWHLKTERLATGVSRLFLVSEGSVVQFSSANFSLTAETEERN |
| | | FPHGNEHLLNWARKEYGAVTSFTELKIARNIYIKVGEDQVFPPK |
| | | CNIGKNFLSLNYLAEYLQPKAAEGCVMSSQPQNEEVHIIELITPN |
| | | SNPYSAFQVDITIDIRPSQEDLEVVKNLILILKCKKSVNWVIKSFD |
| | | VKGSLKIIAPNSIGFGKESERSMTMTKSIRDDIPSTQGNLVKWAL |
| | | DNGYSPITSYTMAPVANRFHLRLENNAEEMGDEEVHTIPPELRIL |
| | | LDPGALPALQNPPIRGGEGQNGGLPFPFPDISRRVWNEEGEDGLP |
| | | RPKDPVIPSIQLFPGLREPEEVQGSVDIALSVKCDNEKMIVAVEK |
| | | DSFQASGYSGMDVTLLDPTCKAKMNGTHFVLESPLNGCGTRPR |
| | | WSALDGVVYYNSIVIQVPALGDSSGWPDGYEDLESGDNGFPGD |
| | | MDEGDASLFTRPEIVVFNCSLQQVRNPSSFQEQPHGNITFNMEL |
| | | YNTDLFLVPSQGVFSVPENGHVYVEVSVTKAEQELGFAIQTCFIS |
| | | PYSNPDRMSHYTIIENICPKDESVKFYSPKRVHFPIPQADMDKKR |
| | | FSFVFKPVFNTSLLFLQCELTLCTKMEKHPQKLPKCVPPDEACTS |
| | | LDASIIWAMMQNKKTFTKPLAVIHHEAESKEKGPSMKEPNPISPP |
| | | IFHGLDTLTV |
| SEQ | hCH1- | ASTKGPSVFPLAPSSKSTSGGTAALGCLVKDYFPEPVTVSWNSG |
| ID NO: | hFc Hole- | ALTSGVHTFPAVLQSSGLYSLSSVVTVPSSSLGTQTYICNVNHKP |
| 192 | 3x4GS- | SNTKVDKRVEPKSCDKTHTCPPCPAPELLGGPSVFLFPPKPKDTL |
| | TGFbR2 | MISRTPEVTCVVVDVSHEDPEVKFNWYVDGVEVHNAKTKPREE |
| | | QYNSTYRVVSVLTVLHQDWLNGKEYKCKVSNKALPAPIEKTIS |
| | | KAKGQPREPQVCTLPPSREEMTKNQVSLSCAVKGFYPSDIAVE |
| | | WESNGQPENNYKTTPPVLDSDGSFFLVSKLTVDKSRWQQGNVF |
| | | SCSVMHEALHNHYTQKSLSLSPGXGGGGSGGGGSGGGGSIPPH |
| | | VQKSVNNDMIVTDNNGAVKFPQLCKFCDVRFSTCDNQKSCMS |
| | | NCSITSICEKPQEVCVAVWRKNDENITLETVCHDPKLPYHDFILE |
| | | DAASPKCIMKEKKKPGETFFMCSCSSDECNDNIIFSEEYNTSNPD, |
| | | wherein X is K or absent |
| SEQ | hCH1- | ASTKGPSVFPLAPSSKSTSGGTAALGCLVKDYFPEPVTVSWNSG |
| ID NO: | hFc Knob- | ALTSGVHTFPAVLQSSGLYSLSSVVTVPSSSLGTQTYICNVNHKP |
| 193 | 3x4GS- | SNTKVDKRVEPKSCDKTHTCPPCPAPELLGGPSVFLFPPKPKDTL |
| | TGFbR2 | MISRTPEVTCVVVDVSHEDPEVKFNWYVDGVEVHNAKTKPREE |
| | | QYNSTYRVVSVLTVLHQDWLNGKEYKCKVSNKALPAPIEKTIS |
| | | KAKGQPREPQVYTLPPCREEMTKNQVSLWCLVKGFYPSDIAVE |
| | | WESNGQPENNYKTTPPVLDSDGSFFLYSKLTVDKSRWQQGNVF |
| | | SCSVMHEALHNHYTQKSLSLSPGXGGGGSGGGGSGGGGSIPPH |
| | | VQKSVNNDMIVTDNNGAVKFPQLCKFCDVRFSTCDNQKSCMS |
| | | NCSITSICEKPQEVCVAVWRKNDENITLETVCHDPKLPYHDFILE |
| | | DAASPKCIMKEKKKPGETFFMCSCSSDECNDNIIFSEEYNTSNPD, |
| | | wherein X is K or absent |
| SEQ | hFc Hole- | DKTHTCPPCPAPELLGGPSVFLFPPKPKDTLMISRTPEVTCVVVD |
| ID NO: | 3x4GS- | VSHEDPEVKFNWYVDGVEVHNAKTKPREEQYNSTYRVVSVLT |
| 194 | TGFbR2 | VLHQDWLNGKEYKCKVSNKALPAPIEKTISKAKGQPREPQVCT |
| | | LPPSREEMTKNQVSLSCAVKGFYPSDIAVEWESNGQPENNYKTT |
| | | PPVLDSDGSFFLVSKLTVDKSRWQQGNVFSCSVMHEALHNHYT |
| | | QKSLSLSPGXGGGGSGGGGSGGGGSIPPHVQKSVNNDMIVTDN |
| | | NGAVKFPQLCKFCDVRFSTCDNQKSCMSNCSITSICEKPQEVCV |
| | | AVWRKNDENITLETVCHDPKLPYHDFILEDAASPKCIMKEKKKP |
| | | GETFFMCSCSSDECNDNIIFSEEYNTSNPD, wherein X is K or |
| | | absent |
| SEQ | hFc Knob- | DKTHTCPPCPAPELLGGPSVFLFPPKPKDTLMISRTPEVTCVVVD |
| ID NO: | 3x4GS- | VSHEDPEVKFNWYVDGVEVHNAKTKPREEQYNSTYRVVSVLT |
| 195 | TGFbR2 | VLHQDWLNGKEYKCKVSNKALPAPIEKTISKAKGQPREPQVYT |
| | | LPPCREEMTKNQVSLWCLVKGFYPSDIAVEWESNGQPENNYKT |
| | | TPPVLDSDGSFFLYSKLTVDKSRWQQGNVFSCSVMHEALHNHY |
| | | TQKSLSLSPGXGGGGSGGGGSGGGGSIPPHVQKSVNNDMIVTD |
| | | NNGAVKFPQLCKFCDVRFSTCDNQKSCMSNCSITSICEKPQEVC |
| | | VAVWRKNDENITLETVCHDPKLPYHDFILEDAASPKCIMKEKK |
| | | KPGETFFMCSCSSDECNDNIIFSEEYNTSNPD, |
| | | wherein X is K or absent |
| SEQ | TGFbR2- | IPPHVQKSVNNDMIVTDNNGAVKFPQLCKFCDVRFSTCDNQKS |
| ID NO: | 3x4GS-hCH1- | CMSNCSITSICEKPQEVCVAVWRKNDENITLETVCHDPKLPYHD |
| 196 | hFc_Hole | FILEDAASPKCIMKEKKKPGETFFMCSCSSDECNDNIIFSEEYNTS |
| | | NPDGGGGSGGGGSGGGGSASTKGPSVFPLAPSSKSTSGGTAALG |
| | | CLVKDYFPEPVTVSWNSGALTSGVHTFPAVLQSSGLYSLSSVVT |
| | | VPSSSLGTQTYICNVNHKPSNTKVDKRVEPKSCDKTHTCPPCPA |
| | | PELLGGPSVFLFPPKPKDTLMISRTPEVTCVVVDVSHEDPEVKFN |
| | | WYVDGVEVHNAKTKPREEQYNSTYRVVSVLTVLHQDWLNGK |
| | | EYKCKVSNKALPAPIEKTISKAKGQPREPQVCTLPPSREEMTKN |
| | | QVSLSCAVKGFYPSDIAVEWESNGQPENNYKTTPPVLDSDGSFF |
| | | LVSKLTVDKSRWQQGNVFSCSVMHEALHNHYTQKSLSLSPGX, |
| | | wherein X is K or absent |
| SEQ | TGFbR2- | IPPHVQKSVNNDMIVTDNNGAVKFPQLCKFCDVRFSTCDNQKS |
| ID NO: | 3x4GS-hCH1- | CMSNCSITSICEKPQEVCVAVWRKNDENITLETVCHDPKLPYHD |
| 197 | hFc_Knob | FILEDAASPKCIMKEKKKPGETFFMCSCSSDECNDNIIFSEEYNTS |
| | | NPDGGGGSGGGGSGGGGSASTKGPSVFPLAPSSKSTSGGTAALG |
| | | CLVKDYFPEPVTVSWNSGALTSGVHTFPAVLQSSGLYSLSSVVT |
| | | VPSSSLGTQTYICNVNHKPSNTKVDKRVEPKSCDKTHTCPPCPA |
| | | PELLGGPSVFLFPPKPKDTLMISRTPEVTCVVVDVSHEDPEVKFN |
| | | WYVDGVEVHNAKTKPREEQYNSTYRVVSVLTVLHQDWLNGK |
| | | EYKCKVSNKALPAPIEKTISKAKGQPREPQVYTLPPCREEMTKN |
| | | QVSLWCLVKGFYPSDIAVEWESNGQPENNYKTTPPVLDSDGSFF |
| | | LYSKLTVDKSRWQQGNVFSCSVMHEALHNHYTQKSLSLSPGX, |
| | | wherein X is K or absent |
| SEQ | TGFbR2- | IPPHVQKSVNNDMIVTDNNGAVKFPQLCKFCDVRFSTCDNQKS |
| ID NO: | 3x4GS- | CMSNCSITSICEKPQEVCVAVWRKNDENITLETVCHDPKLPYHD |
| 198 | hCLIg_vl | FILEDAASPKCIMKEKKKPGETFFMCSCSSDECNDNIIFSEEYNTS |
| | | NPDGGGGSGGGGSGGGGSGQPKANPTVTLFPPSSEELQANKAT |
| | | LVCLISDFYPGAVTVAWKADGSPVKAGVETTKPSKQSNNKYAA |
| | | SSYLSLTPEQWKSHRSYSCQVTHEGSTVEKTVAPTECS |
| SEQ | TGFβR2- | IPPHVQKSVNNDMIVTDNNGAVKFPQLCKFCDVRFSTCDNQKS |
| ID NO: | 3x4GS- | CMSNCSITSICEKPQEVCVAVWRKNDENITLETVCHDPKLPYHD |
| 199 | hCLIg_vk | FILEDAASPKCIMKEKKKPGETFFMCSCSSDECNDNIIFSEEYNTS |
| | | NPDGGGGSGGGGSGGGGSRTVAAPSVFIFPPSDEQLKSGTASVV |
| | | CLLNNFYPREAKVQWKVDNALQSGNSQESVTEQDSKDSTYSLS |
| | | STLTLSKADYEKHKVYACEVTHQGLSSPVTKSFNRGEC |

### Immune Cell Engagers

[0408] The immune cell engagers of the multispecific or multifunctional molecules disclosed herein can mediate binding to, and/or activation of, an immune cell, e.g., an immune effector cell. In some embodiments, the immune cell is chosen from a T cell, an NK cell, a B cell, a dendritic cell, or a macrophage cell engager, or a combination thereof. In some embodiments, the immune cell engager is chosen from one, two, three, or all of a T cell engager, NK cell engager, a B cell engager, a dendritic cell engager, or a macrophage cell engager, or a combination thereof. The immune cell engager can be an agonist of the immune system. In some embodiments, the immune cell engager can be an antibody molecule, a ligand molecule (e.g., a ligand that further comprises an immunoglobulin constant region, e.g., an Fc region), a small molecule, a nucleotide molecule.

### Natural Killer Cell Engagers

[0409] Natural Killer (NK) cells recognize and destroy tumors and virus-infected cells in an antibody-independent manner. The regulation of NK cells is mediated by activating and inhibiting receptors on the NK cell surface. One family of activating receptors is the natural cytotoxicity receptors (NCRs) which include NKp30, NKp44 and NKp46. The NCRs initiate tumor targeting by recognition of heparan sulfate on cancer cells. NKG2D is a receptor that provides both stimulatory and costimulatory innate immune responses on activated killer (NK) cells, leading to cytotoxic activity. DNAM1 is a receptor involved in intercellular adhesion, lymphocyte signaling, cytotoxicity and lymphokine secretion mediated by cytotoxic T-lymphocyte (CTL) and NK cell. DAP10 (also known as HCST) is a transmembrane adapter protein which associates with KLRK1 to form an activation receptor KLRK1-HCST in lymphoid and myeloid cells; this receptor plays a major role in triggering cytotoxicity against target cells expressing cell surface ligands such as MHC class I chain-related MICA and MICB, and U(optionally L1)6-binding proteins (ULBPs); it KLRK1-HCST receptor plays a role in immune surveillance against tumors and is required for cytolysis of tumors cells; indeed, melanoma cells that do not express KLRK1 ligands escape from immune surveillance mediated by NK cells. CD16 is a receptor for the Fc region of IgG, which binds complexed or aggregated IgG and also monomeric IgG and thereby mediates antibody-dependent cellular cytotoxicity (ADCC) and other antibody-dependent responses, such as phagocytosis.

[0410] The present disclosure provides, inter alia, multispecific (e.g., bi-, tri-, quad-specific) or multifunctional molecules, that are engineered to contain one or more NK cell engagers that mediate binding to and/or activation of an NK cell. Accordingly, in some embodiments, the NK cell engager is selected from an antigen binding domain or ligand that binds to (e.g., activates): NKp30, NKp40, NKp44, NKp46, NKG2D, DNAM1, DAP10, CD16 (e.g., CD16a, CD16b, or both), CRTAM, CD27, PSGL1, CD96, CD100 (SEMA4D), NKp80, CD244 (also known as SLAMF4 or 2B4), SLAMF6, SLAMF7, KIR2DS2, KIR2DS4, KIR3DS1, KIR2DS3, KIR2DS5, KIR2DS1, CD94, NKG2C, NKG2E, or CD160.

[0411] In some embodiments, the NK cell engager is an antigen binding domain that binds to NKp30 (e.g., NKp30 present, e.g., expressed or displayed, on the surface of an NK cell) and comprises any CDR amino acid sequence, framework region (FWR) amino acid sequence, or variable region amino acid sequence disclosed in Tables 7, 8, 8A, 8B, 9, or 10. In some embodiments, the NK cell engager is an antigen binding domain that binds to NKp30 (e.g., NKp30 present, e.g., expressed or displayed, on the surface of an NK cell) and comprises any CDR amino acid sequence, framework region (FWR) amino acid sequence, or variable region amino acid sequence disclosed in U.S. Pat. Nos. 6,979,546, 9,447,185, PCT Application No. WO2015121383A1, PCT Application No. WO2016110468A1, PCT Application No. WO2004056392A1, or U.S. Application Publication No. US20070231322A1, the sequences of which are hereby incorporated by reference. In some embodiments, binding of the NK cell engager, e.g., antigen binding domain that binds to NKp30, to the NK cell activates the NK cell. An antigen binding domain that binds to NKp30 (e.g., NKp30 present, e.g., expressed or displayed, on the surface of an NK cell) may be said to target NKp30, the NK cell, or both.

[0412] In some embodiments, the antigen binding domain that binds to NKp30 comprises one or more CDRs (e.g., VHCDR1, VHCDR2, VHCDR3, VLCDR1, VLCDR2, and/or VLCDR3) disclosed in Table 7, Table 18, or Table 8, or a sequence having at least 85%, 90%, 95%, or 99% identity thereto. In some embodiments, the antigen binding domain that binds to NKp30 comprises one or more framework regions (e.g., VHFWR1, VHFWR2, VHFWR3, VHFWR4, VLFWR1, VLFWR2, VLFWR3, and/or VLFWR4) disclosed in Table 7, Table 18, or Table 8, or a sequence having at least 85%, 90%, 95%, or 99% identity thereto. In some embodiments, the antigen binding domain that binds to NKp30 comprises a VH and/or a VL disclosed in Table 9, or a sequence having at least 85%, 90%, 95%, or 99% identity thereto. In some embodiments, the antigen binding domain that binds to NKp30 comprises an amino acid sequence disclosed in Table 10, or a sequence having at least 85%, 90%, 95%, or 99% identity thereto.

[0413] In some embodiments, the antigen binding domain that binds to NKP30 comprises one or more CDRs (e.g., VHCDR1, VHCDR2, VHCDR3, VLCDR1, VLCDR2, and/or VLCDR3) disclosed in Table 8A and/or 8B, or a sequence having at least 85%, 90%, 95%, or 99% identity thereto. In some embodiments, the antigen binding domain that binds to NKP30 comprises one or more framework regions (e.g., VHFWR1, VHFWR2, VHFWR3, VHFWR4, VLFWR1, VLFWR2, VLFWR3, and/or VLFWR4) disclosed in Table 8A and/or 8B, or a sequence having at least 85%, 90%, 95%, or 99% identity thereto. In some embodiments, the antigen binding domain that binds to NKP30 comprises a VH and/or a VL disclosed in Table 9, or a sequence having at least 85%, 90%, 95%, or 99% identity thereto.

[0414] In some embodiments, the antigen binding domain that binds to NKp30 comprises a VH comprising a heavy chain complementarity determining region 1 (VHCDR1), a VHCDR2, and a VHCDR3, and a VL comprising a light chain complementarity determining region 1 (VLCDR1), a VLCDR2, and a VLCDR3.

[0415] In some embodiments, the VHCDR1, VHCDR2, and VHCDR3 comprise the amino acid sequences of SEQ ID NOs: 7313, 6001, and 7315, respectively (or a sequence having at least 85%, 90%, 95%, or 99% identity thereto). In some embodiments, the VHCDR1, VHCDR2, and VHCDR3 comprise the amino acid sequences of SEQ ID NOs: 7313, 6001, and 6002, respectively (or a sequence having at least 85%, 90%, 95%, or 99% identity thereto). In some embodiments, the VHCDR1, VHCDR2, and VHCDR3 comprise the amino acid sequences of SEQ ID NOs: 7313, 6008, and 6009, respectively (or a sequence having at least 85%, 90%, 95%, or 99% identity thereto). In some embodiments, the VHCDR1, VHCDR2, and VHCDR3 comprise the amino acid sequences of SEQ ID NOs: 7313, 7385, and 7315, respectively (or a sequence having at least 85%, 90%, 95%, or 99% identity thereto). In some embodiments, the VHCDR1, VHCDR2, and VHCDR3 comprise the amino acid sequences of SEQ ID NOs: 7313, 7318, and 6009, respectively (or a sequence having at least 85%, 90%, 95%, or 99% identity thereto). In some embodiments, the VHCDR1, VHCDR2, and VHCDR3 comprise the amino acid sequences of SEQ ID NOs: 375, 377, and 379, respectively (or a sequence having at least 85%, 90%, 95%, or 99% identity thereto). In some embodiments, the VHCDR1, VHCDR2, and VHCDR3 comprise the amino acid sequences of SEQ ID NOs: 389, 391, and 393, respectively (or a sequence having at least 85%, 90%, 95%, or 99% identity thereto). In some embodiments, the VHCDR1, VHCDR2, and VHCDR3 comprise the amino acid sequences of SEQ ID NOs: 403, 405, and 407, respectively (or a sequence having at least 85%, 90%, 95%, or 99% identity thereto). In some embodiments, the VHCDR1, VHCDR2, and VHCDR3 comprise the amino acid sequences of SEQ ID NOs: 417, 419, and 421, respectively (or a sequence having at least 85%, 90%, 95%, or 99% identity thereto). In some embodiments, the VHCDR1, VHCDR2, and VHCDR3 comprise the amino acid sequences of SEQ ID NOs: 431, 433, and 435, respectively (or a sequence having at least 85%, 90%, 95%, or 99% identity thereto). In some embodiments, the VHCDR1, VHCDR2, and VHCDR3 comprise the amino acid sequences of SEQ ID NOs: 445, 447, and 449, respectively (or a sequence having at least 85%, 90%, 95%, or 99% identity thereto). In some embodiments, the VHCDR1, VHCDR2, and VHCDR3 comprise the amino acid sequences of SEQ ID NOs: 459, 461, and 463, respectively (or a sequence having at least 85%, 90%, 95%, or 99% identity thereto). In some embodiments, the VHCDR1, VHCDR2, and VHCDR3 comprise the amino acid sequences of SEQ ID NOs: 472, 474, and 476, respectively (or a sequence having at least 85%, 90%, 95%, or 99% identity thereto).

[0416] In some embodiments, the VLCDR1, VLCDR2, and VLCDR3 comprise the amino acid sequences of SEQ ID NOs: 7326, 7327, and 7329, respectively (or a sequence having at least 85%, 90%, 95%, or 99% identity thereto). In some embodiments, the VLCDR1, VLCDR2, and VLCDR3 comprise the amino acid sequences of SEQ ID NOs: 6063, 6064, and 7293, respectively (or a sequence having at least 85%, 90%, 95%, or 99% identity thereto). In some embodiments, the VLCDR1, VLCDR2, and VLCDR3 comprise the amino acid sequences of SEQ ID NOs: 6070, 6071, and 6072, respectively (or a sequence having at least 85%, 90%, 95%, or 99% identity thereto). In some embodiments, the VLCDR1, VLCDR2, and VLCDR3 comprise the amino acid sequences of SEQ ID NOs: 6070, 6064, and 7321, respectively (or a sequence having at least 85%, 90%, 95%, or 99% identity thereto). In some embodiments, the VLCDR1, VLCDR2, and VLCDR3 comprise the amino acid sequences of SEQ ID NOs: 382, 384, and 386, respectively (or a sequence having at least 85%, 90%, 95%, or 99% identity thereto). In some embodiments, the VLCDR1, VLCDR2, and VLCDR3 comprise the amino acid sequences of SEQ ID NOs: 396, 398, and 400, respectively (or a sequence having at least 85%, 90%, 95%, or 99% identity thereto). In some embodiments, the VLCDR1, VLCDR2, and VLCDR3 comprise the amino acid sequences of SEQ ID NOs: 410, 412, and 414, respectively (or a sequence having at least 85%, 90%, 95%, or 99% identity thereto). In some embodiments, the VLCDR1, VLCDR2, and VLCDR3 comprise the amino acid sequences of SEQ ID NOs: 424, 426, and 428, respectively (or a sequence having at least 85%, 90%, 95%, or 99% identity thereto). In some embodiments, the VLCDR1, VLCDR2, and VLCDR3 comprise the amino acid sequences of SEQ ID NOs: 438, 440, and 442, respectively (or a sequence having at least 85%, 90%, 95%, or 99% identity thereto). In some embodiments, the VLCDR1, VLCDR2, and VLCDR3 comprise the amino acid sequences of SEQ ID NOs: 452, 454, and 456, respectively (or a sequence having at least 85%, 90%, 95%, or 99% identity thereto). In some embodiments, the VLCDR1, VLCDR2, and VLCDR3 comprise the amino acid sequences of SEQ ID NOs: 466, 468, and 469, respectively (or a sequence having at least 85%, 90%, 95%, or 99% identity thereto). In some embodiments, the VLCDR1, VLCDR2, and VLCDR3 comprise the amino acid sequences of SEQ ID NOs: 479, 481, and 483, respectively (or a sequence having at least 85%, 90%, 95%, or 99% identity thereto).

[0417] In some embodiments, the VHCDR1, VHCDR2, VHCDR3, VLCDR1, VLCDR2, and VLCDR3 comprise the amino acid sequences of SEQ ID NOs: 7313, 6001, 7315, 7326, 7327, and 7329, respectively (or a sequence having at least 85%, 90%, 95%, or 99% identity thereto). In some embodiments, the VHCDR1, VHCDR2, VHCDR3, VLCDR1, VLCDR2, and VLCDR3 comprise the amino acid sequences of SEQ ID NOs: 7313, 6001, 6002, 6063, 6064, and 7293, respectively (or a sequence having at least 85%, 90%, 95%, or 99% identity thereto). In some embodiments, the VHCDR1, VHCDR2, VHCDR3, VLCDR1, VLCDR2, and VLCDR3 comprise the amino acid sequences of SEQ ID NOs: 7313, 6008, 6009, 6070, 6071, and 6072, respectively (or a sequence having at least 85%, 90%, 95%, or 99% identity thereto). In some embodiments, the VHCDR1, VHCDR2, VHCDR3, VLCDR1, VLCDR2, and VLCDR3 comprise the amino acid sequences of SEQ ID NOs: 7313, 7385, 7315, 6070, 6064, and 7321, respectively (or a sequence having at least 85%, 90%, 95%, or 99% identity thereto). In some embodiments, the VHCDR1, VHCDR2, VHCDR3, VLCDR1, VLCDR2, and VLCDR3 comprise the amino acid sequences of SEQ ID NOs: 7313, 7318, 6009, 6070, 6064, and 7321, respectively (or a sequence having at least 85%, 90%, 95%, or 99% identity thereto). In some embodiments, the VHCDR1, VHCDR2, VHCDR3, VLCDR1, VLCDR2, and VLCDR3 comprise the amino acid sequences of SEQ ID NOs: 375, 377, 379, 382, 384, and 386, respectively (or a sequence having at least 85%, 90%, 95%, or 99% identity thereto) In some embodiments, the VHCDR1, VHCDR2, VHCDR3, VLCDR1, VLCDR2, and VLCDR3 comprise the amino acid sequences of SEQ ID NOs: 389, 391, 393, 396, 398, and 400, respectively (or a sequence having at least 85%, 90%, 95%, or 99% identity thereto) In some embodiments, the VHCDR1, VHCDR2, VHCDR3, VLCDR1, VLCDR2, and VLCDR3 comprise the amino acid sequences of SEQ ID NOs: 403, 405, 407, 410, 412, and 414, respectively (or a sequence having at least 85%, 90%, 95%, or 99% identity thereto) In some embodiments, the VHCDR1, VHCDR2, VHCDR3, VLCDR1, VLCDR2, and VLCDR3 comprise the amino acid sequences of SEQ ID NOs: 417, 419, 421, 424, 426, and 428, respectively (or a sequence having at least 85%, 90%, 95%, or 99% identity thereto) In some embodiments, the VHCDR1, VHCDR2, VHCDR3, VLCDR1, VLCDR2, and VLCDR3 comprise the amino acid sequences of SEQ ID NOs: 431, 433, 435, 438, 440, and 442, respectively (or a sequence having at least 85%, 90%, 95%, or 99% identity thereto) In some embodiments, the VHCDR1, VHCDR2, VHCDR3, VLCDR1, VLCDR2, and VLCDR3 comprise the amino acid sequences of SEQ ID NOs: 445, 447, 449, 452, 454, and 456, respectively (or a sequence having at least 85%, 90%, 95%, or 99% identity thereto) In some embodiments, the VHCDR1, VHCDR2, VHCDR3, VLCDR1, VLCDR2, and VLCDR3 comprise the amino acid sequences of SEQ ID NOs: 459, 461, 463, 466, 468, and 469, respectively (or a sequence having at least 85%, 90%, 95%, or 99% identity thereto) In some embodiments, the VHCDR1, VHCDR2, VHCDR3, VLCDR1, VLCDR2, and VLCDR3 comprise the amino acid sequences of SEQ ID NOs: 472, 474, 476, 479, 481, and 483, respectively (or a sequence having at least 85%, 90%, 95%, or 99% identity thereto).

[0418] In some embodiments, the VH comprises an amino acid sequence selected from the group consisting of SEQ ID NOs: 7298 or 7300-7304 (or a sequence having at least 85%, 90%, 95%, or 99% identity thereto) and/or the VL comprises an amino acid sequence selected from the group consisting of SEQ ID NOs: 7299 or 7305-7309 (or a sequence having at least 85%, 90%, 95%, or 99% identity thereto). In some embodiments, the VH and VL comprise the amino acid sequences of SEQ ID NOs: 7302 and 7305, respectively (or a sequence having at least 85%, 90%, 95%, or 99% identity thereto). In some embodiments, the VH and VL comprise the amino acid sequences of SEQ ID NOs: 7302 and 7309, respectively (or a sequence having at least 85%, 90%, 95%, or 99% identity thereto).

[0419] In some embodiments, the VH comprises an amino acid sequence selected from the group consisting of SEQ ID NOs: 6121 or 6123-6128 (or a sequence having at least 85%, 90%, 95%, or 99% identity thereto) and/or the VL comprises an amino acid sequence selected from the group consisting of SEQ ID NOs: 7294 or 6137-6141 (or a sequence having at least 85%, 90%, 95%, or 99% identity thereto). In some embodiments, the VH comprises an amino acid sequence selected from the group consisting of SEQ ID NOs: 6122 or 6129-6134 (or a sequence having at least 85%, 90%, 95%, or 99% identity thereto) and/or the VL comprises an amino acid sequence selected from the group consisting of SEQ ID NOs: 6136 or 6142-6147 (or a sequence having at least 85%, 90%, 95%, or 99% identity thereto). In some embodiments, the VH and VL comprise the amino acid sequences of SEQ ID NOs: 7295 and 7296, respectively (or a sequence having at least 85%, 90%, 95%, or 99% identity thereto). In some embodiments, the VH and VL comprise the amino acid sequences of SEQ ID NOs: 7297 and 7296, respectively (or a sequence having at least 85%, 90%, 95%, or 99% identity thereto). In some embodiments, the VH and VL comprise the amino acid sequences of SEQ ID NOs: 6122 and 6136, respectively (or a sequence having at least 85%, 90%, 95%, or 99% identity thereto).

[0420] In some embodiments, the antigen binding domain that binds to NKp30 comprises the amino acid sequence of SEQ ID NO: 7310 (or a sequence having at least 85%, 90%, 95%, or 99% identity thereto). In some embodiments, the antigen binding domain that binds to NKp30 comprises the amino acid sequence of SEQ ID NO: 7311 (or a sequence having at least 85%, 90%, 95%, or 99% identity thereto). In some embodiments, the antigen binding domain that binds to NKp30 comprises the amino acid sequence of SEQ ID NO: 6187, 6188, 6189 or 6190 (or a sequence having at least 85%, 90%, 95%, or 99% identity thereto).

[0421] In some embodiments, the antigen binding domain that targets NKp30 comprises a VH comprising a heavy chain complementarity determining region 1 (VHCDR1) amino acid sequence of SEQ ID NO: 6000 (or a sequence with no more than 1, 2, 3, or 4 mutations, e.g., substitutions, additions, or deletions), a VHCDR2 amino acid sequence of SEQ ID NO: 6001 (or a sequence with no more than 1, 2, 3, or 4 mutations, e.g., substitutions, additions, or deletions), and/or a VHCDR3 amino acid sequence of SEQ ID NO: 6002 (or a sequence with no more than 1, 2, 3, or 4 mutations, e.g., substitutions, additions, or deletions). In some embodiments, the NKp30 antigen binding domain comprises a VH comprising a VHCDR1 amino acid sequence of SEQ ID NO: 6000, a VHCDR2 amino acid sequence of SEQ ID NO: 6001, and/or a VHCDR3 amino acid sequence of SEQ ID NO: 6002.

[0422] In some embodiments, the antigen binding domain that targets NKp30 comprises a VL comprising a light chain complementarity determining region 1 (VLCDR1) amino acid sequence of SEQ ID NO: 6063 (or a sequence with no more than 1, 2, 3, or 4 mutations, e.g., substitutions, additions, or deletions), a VLCDR2 amino acid sequence of SEQ ID NO: 6064 (or a sequence with no more than 1, 2, 3, or 4 mutations, e.g., substitutions, additions, or deletions), and/or a VLCDR3 amino acid sequence of SEQ ID NO: 7293 (or a sequence with no more than 1, 2, 3, or 4 mutations, e.g., substitutions, additions, or deletions). In some embodiments, the antigen binding domain that targets NKp30 comprises a VL comprising a VLCDR1 amino acid sequence of SEQ ID NO: 6063, a VLCDR2 amino acid sequence of SEQ ID NO: 6064, and a VLCDR3 amino acid sequence of SEQ ID NO: 7293.

[0423] In some embodiments, the antigen binding domain that targets NKp30 comprises a VH comprising a heavy chain complementarity determining region 1 (VHCDR1) amino acid sequence of SEQ ID NO: 6000 (or a sequence with no more than 1, 2, 3, or 4 mutations, e.g., substitutions, additions, or deletions), a VHCDR2 amino acid sequence of SEQ ID NO: 6001 (or a sequence with no more than 1, 2, 3, or 4 mutations, e.g., substitutions, additions, or deletions), and/or a VHCDR3 amino acid sequence of SEQ ID NO: 6002 (or a sequence with no more than 1, 2, 3, or 4 mutations, e.g., substitutions, additions, or deletions), and a VL comprising a light chain complementarity determining region 1 (VLCDR1) amino acid sequence of SEQ ID NO: 6063 (or a sequence with no more than 1, 2, 3, or 4 mutations, e.g., substitutions, additions, or deletions), a VLCDR2 amino acid sequence of SEQ ID NO: 6064 (or a sequence with no more than 1, 2, 3, or 4 mutations, e.g., substitutions, additions, or deletions), and/or a VLCDR3 amino acid sequence of SEQ ID NO: 7293 (or a sequence with no more than 1, 2, 3, or 4 mutations, e.g., substitutions, additions, or deletions). In some embodiments, the NKp30 antigen binding domain comprises a VH comprising a VHCDR1 amino acid sequence of SEQ ID NO: 6000, a VHCDR2 amino acid sequence of SEQ ID NO: 6001, and/or a VHCDR3 amino acid sequence of SEQ ID NO: 6002, and a VL comprising a VLCDR1 amino acid sequence of SEQ ID NO: 6063, a VLCDR2 amino acid sequence of SEQ ID NO: 6064, and a VLCDR3 amino acid sequence of SEQ ID NO: 7293.

[0424] In some embodiments, the antigen binding domain that targets NKp30 comprises a VH comprising a heavy chain complementarity determining region 1 (VHCDR1) amino acid sequence of SEQ ID NO: 6007 (or a sequence with no more than 1, 2, 3, or 4 mutations, e.g., substitutions, additions, or deletions), a VHCDR2 amino acid sequence of SEQ ID NO: 6008 (or a sequence with no more than 1, 2, 3, or 4 mutations, e.g., substitutions, additions, or deletions), and/or a VHCDR3 amino acid sequence of SEQ ID NO: 6009 (or a sequence with no more than 1, 2, 3, or 4 mutations, e.g., substitutions, additions, or deletions). In some embodiments, the NKp30 antigen binding domain comprises a VH comprising a VHCDR1 amino acid sequence of SEQ ID NO: 6007, a VHCDR2 amino acid sequence of SEQ ID NO: 6008, and/or a VHCDR3 amino acid sequence of SEQ ID NO: 6009.

[0425] In some embodiments, the antigen binding domain that targets NKp30 comprises a VL comprising a light chain complementarity determining region 1 (VLCDR1) amino acid sequence of SEQ ID NO: 6070 (or a sequence with no more than 1, 2, 3, or 4 mutations, e.g., substitutions, additions, or deletions), a VLCDR2 amino acid sequence of SEQ ID NO: 6071 (or a sequence with no more than 1, 2, 3, or 4 mutations, e.g., substitutions, additions, or deletions), and/or a VLCDR3 amino acid sequence of SEQ ID NO: 6072 (or a sequence with no more than 1, 2, 3, or 4 mutations, e.g., substitutions, additions, or deletions). In some embodiments, the antigen binding domain that targets NKp30 comprises a VL comprising a VLCDR1 amino acid sequence of SEQ ID NO: 6070, a VLCDR2 amino acid sequence of SEQ ID NO: 6071, and a VLCDR3 amino acid sequence of SEQ ID NO: 6072.

[0426] In some embodiments, the antigen binding domain that targets NKp30 comprises a VH comprising a heavy chain complementarity determining region 1 (VHCDR1) amino acid sequence of SEQ ID NO: 6007 (or a sequence with no more than 1, 2, 3, or 4 mutations, e.g., substitutions, additions, or deletions), a VHCDR2 amino acid sequence of SEQ ID NO: 6008 (or a sequence with no more than 1, 2, 3, or 4 mutations, e.g., substitutions, additions, or deletions), and/or a VHCDR3 amino acid sequence of SEQ ID NO: 6009 (or a sequence with no more than 1, 2, 3, or 4 mutations, e.g., substitutions, additions, or deletions), and a VL comprising a light chain complementarity determining region 1 (VLCDR1) amino acid sequence of SEQ ID NO: 6070 (or a sequence with no more than 1, 2, 3, or 4 mutations, e.g., substitutions, additions, or deletions), a VLCDR2 amino acid sequence of SEQ ID NO: 6071 (or a sequence with no more than 1, 2, 3, or 4 mutations, e.g., substitutions, additions, or deletions), and/or a VLCDR3 amino acid sequence of SEQ ID NO: 6072 (or a sequence with no more than 1, 2, 3, or 4 mutations, e.g., substitutions, additions, or deletions). In some embodiments, the NKp30 antigen binding domain comprises a VH comprising a VHCDR1 amino acid sequence of SEQ ID NO: 6007, a VHCDR2 amino acid sequence of SEQ ID NO: 6008, and/or a VHCDR3 amino acid sequence of SEQ ID NO: 6009, and a VL comprising a VLCDR1 amino acid sequence of SEQ ID NO: 6070, a VLCDR2 amino acid sequence of SEQ ID NO: 6071, and a VLCDR3 amino acid sequence of SEQ ID NO: 6072.

[0427] In some embodiments, the antigen binding domain that targets NKp30 comprises a VH comprising a heavy chain framework region 1 (VHFWR1) amino acid sequence of SEQ ID NO: 6003, a VHFWR2 amino acid sequence of SEQ ID NO: 6004, a VHFWR3 amino acid sequence of SEQ ID NO: 6005, and/or a VHFWR4 amino acid sequence of SEQ ID NO: 6006.

[0428] In some embodiments, the antigen binding domain that targets NKp30 comprises a VL comprising a light chain framework region 1 (VLFWR1) amino acid sequence of SEQ ID NO: 6066, a VLFWR2 amino acid sequence of SEQ ID NO: 6067, a VLFWR3 amino acid sequence of SEQ ID NO: 7292, and/or a VLFWR4 amino acid sequence of SEQ ID NO: 6069.

[0429] In some embodiments, the antigen binding domain that targets NKp30 comprises a VH comprising a heavy chain framework region 1 (VHFWR1) amino acid sequence of SEQ ID NO: 6003, a VHFWR2 amino acid sequence of SEQ ID NO: 6004, a VHFWR3 amino acid sequence of SEQ ID NO: 6005, and/or a VHFWR4 amino acid sequence of SEQ ID NO: 6006, and a VL comprising a light chain framework region 1 (VLFWR1) amino acid sequence of SEQ ID NO: 6066, a VLFWR2 amino acid sequence of SEQ ID NO: 6067, a VLFWR3 amino acid sequence of SEQ ID NO: 7292, and/or a VLFWR4 amino acid sequence of SEQ ID NO: 6069.

[0430] In some embodiments, the antigen binding domain that targets NKp30 comprises a VH comprising a VHFWR1 amino acid sequence of SEQ ID NO: 6003 (or a sequence with no more than 1, 2, 3, 4, 5, or 6 mutations, e.g., substitutions, additions, or deletions, therefrom), a VHFWR2 amino acid sequence of SEQ ID NO: 6004 (or a sequence with no more than 1, 2, 3, 4, 5, or 6 mutations, e.g., substitutions, additions, or deletions, therefrom), a VHFWR3 amino acid sequence of SEQ ID NO: 6005 (or a sequence with no more than 1, 2, 3, 4, 5, 6, 7, 8, 9, 10, or 11 mutations, e.g., substitutions, additions, or deletions), and/or a VHFWR4 amino acid sequence of SEQ ID NO: 6006.

[0431] In some embodiments, the antigen binding domain that targets NKp30 comprises a VL comprising a VLFWR1 amino acid sequence of SEQ ID NO: 6066 (or a sequence with no more than 1, 2, or 3 mutations, e.g., substitutions, additions, or deletions), a VLFWR2 amino acid sequence of SEQ ID NO: 6067 (or a sequence with no more than 1 mutation, e.g., substitution, addition, or deletion), a VLFWR3 amino acid sequence of SEQ ID NO: 7292 (or a sequence with no more than 1 mutation, e.g., substitution, addition, or deletion), and/or a VLFWR4 amino acid sequence of SEQ ID NO: 6069.

[0432] In some embodiments, the antigen binding domain that targets NKp30 comprises a VH comprising a VHFWR1 amino acid sequence of SEQ ID NO: 6003 (or a sequence with no more than 1, 2, 3, 4, 5, or 6 mutations, e.g., substitutions, additions, or deletions, therefrom), a VHFWR2 amino acid sequence of SEQ ID NO: 6004 (or a sequence with no more than 1, 2, 3, 4, 5, or 6 mutations, e.g., substitutions, additions, or deletions, therefrom), a VHFWR3 amino acid sequence of SEQ ID NO: 6005 (or a sequence with no more than 1, 2, 3, 4, 5, 6, 7, 8, 9, 10, or 11 mutations, e.g., substitutions, additions, or deletions), and/or a VHFWR4 amino acid sequence of SEQ ID NO: 6006, and a VL comprising a VLFWR1 amino acid sequence of SEQ ID NO: 6066 (or a sequence with no more than 1, 2, or 3 mutations, e.g., substitutions, additions, or deletions), a VLFWR2 amino acid sequence of SEQ ID NO: 6067 (or a sequence with no more than 1 mutation, e.g., substitution, addition, or deletion), a VLFWR3 amino acid sequence of SEQ ID NO: 7292 (or a sequence with no more than 1 mutation, e.g., substitution, addition, or deletion), and/or a VLFWR4 amino acid sequence of SEQ ID NO: 6069.

[0433] In some embodiments, the antigen binding domain that targets NKp30 comprises a VH comprising a heavy chain framework region 1 (VHFWR1) amino acid sequence of SEQ ID NO: 6010, a VHFWR2 amino acid sequence of SEQ ID NO: 6011, a VHFWR3 amino acid sequence of SEQ ID NO: 6012, and/or a VHFWR4 amino acid sequence of SEQ ID NO: 6013.

[0434] In some embodiments, the antigen binding domain that targets NKp30 comprises a VL comprising a light chain framework region 1 (VLFWR1) amino acid sequence of SEQ ID NO: 6073, a VLFWR2 amino acid sequence of SEQ ID NO: 6074, a VLFWR3 amino acid sequence of SEQ ID NO: 6075, and/or a VLFWR4 amino acid sequence of SEQ ID NO: 6076.

[0435] In some embodiments, the antigen binding domain that targets NKp30 comprises a VH comprising a heavy chain framework region 1 (VHFWR1) amino acid sequence of SEQ ID NO: 6010, a VHFWR2 amino acid sequence of SEQ ID NO: 6011, a VHFWR3 amino acid sequence of SEQ ID NO: 6012, and/or a VHFWR4 amino acid sequence of SEQ ID NO: 6013, and a VL comprising a light chain framework region 1 (VLFWR1) amino acid sequence of SEQ ID NO: 6073, a VLFWR2 amino acid sequence of SEQ ID NO: 6074, a VLFWR3 amino acid sequence of SEQ ID NO: 6075, and/or a VLFWR4 amino acid sequence of SEQ ID NO: 6076.

[0436] In some embodiments, the antigen binding domain that targets NKp30 comprises a VH comprising a VHFWR1 amino acid sequence of SEQ ID NO: 6010 (or a sequence with no more than 1, 2, 3, 4, 5, or 6 mutations, e.g., substitutions, additions, or deletions, therefrom), a VHFWR2 amino acid sequence of SEQ ID NO: 6011 (or a sequence with no more than 1, 2, 3, 4, 5, or 6 mutations, e.g., substitutions, additions, or deletions, therefrom), a VHFWR3 amino acid sequence of SEQ ID NO: 6012 (or a sequence with no more than 1, 2, 3, 4, 5, 6, 7, 8, 9, 10, or 11 mutations, e.g., substitutions, additions, or deletions), and/or a VHFWR4 amino acid sequence of SEQ ID NO: 6013.

[0437] In some embodiments, the antigen binding domain that targets NKp30 comprises a VL comprising a VLFWR1 amino acid sequence of SEQ ID NO: 6073 (or a sequence with no more than 1, 2, or 3 mutations, e.g., substitutions, additions, or deletions), a VLFWR2 amino acid sequence of SEQ ID NO: 6074 (or a sequence with no more than 1 mutation, e.g., substitution, addition, or deletion), a VLFWR3 amino acid sequence of SEQ ID NO: 6075 (or a sequence with no more than 1 mutation, e.g., substitution, addition, or deletion), and/or a VLFWR4 amino acid sequence of SEQ ID NO: 6076.

[0438] In some embodiments, the antigen binding domain that targets NKp30 comprises a VH comprising a VHFWR1 amino acid sequence of SEQ ID NO: 6010 (or a sequence with no more than 1, 2, 3, 4, 5, or 6 mutations, e.g., substitutions, additions, or deletions, therefrom), a VHFWR2 amino acid sequence of SEQ ID NO: 6011 (or a sequence with no more than 1, 2, 3, 4, 5, or 6 mutations, e.g., substitutions, additions, or deletions, therefrom), a VHFWR3 amino acid sequence of SEQ ID NO: 6012 (or a sequence with no more than 1, 2, 3, 4, 5, 6, 7, 8, 9, 10, or 11 mutations, e.g., substitutions, additions, or deletions), and/or a VHFWR4 amino acid sequence of SEQ ID NO: 6013, and a VL comprising a VLFWR1 amino acid sequence of SEQ ID NO: 6073 (or a sequence with no more than 1, 2, or 3 mutations, e.g., substitutions, additions, or deletions), a VLFWR2 amino acid sequence of SEQ ID NO: 6074 (or a sequence with no more than 1 mutation, e.g., substitution, addition, or deletion), a VLFWR3 amino acid sequence of SEQ ID NO: 6075 (or a sequence with no more than 1 mutation, e.g., substitution, addition, or deletion), and/or a VLFWR4 amino acid sequence of SEQ ID NO: 6076.

[0439] In some embodiments, the antigen binding domain that targets NKp30 comprises a VH comprising a heavy chain framework region 1 (VHFWR1) amino acid sequence of SEQ ID NO: 6014, a VHFWR2 amino acid sequence of SEQ ID NO: 6015, a VHFWR3 amino acid sequence of SEQ ID NO: 6016, and/or a VHFWR4 amino acid sequence of SEQ ID NO: 6017.

[0440] In some embodiments, the antigen binding domain that targets NKp30 comprises a VH comprising a VHFWR1 amino acid sequence of SEQ ID NO: 6014 (or a sequence with no more than 1, 2, 3, 4, 5, or 6 mutations, e.g., substitutions, additions, or deletions, therefrom), a VHFWR2 amino acid sequence of SEQ ID NO: 6015 (or a sequence with no more than 1, 2, 3, 4, 5, or 6 mutations, e.g., substitutions, additions, or deletions, therefrom), a VHFWR3 amino acid sequence of SEQ ID NO: 6016 (or a sequence with no more than 1, 2, 3, 4, 5, 6, 7, 8, 9, 10, or 11 mutations, e.g., substitutions, additions, or deletions), and/or a VHFWR4 amino acid sequence of SEQ ID NO: 6017.

[0441] In some embodiments, the antigen binding domain that targets NKp30 comprises a VL comprising a light chain framework region 1 (VLFWR1) amino acid sequence of SEQ ID NO: 6077, a VLFWR2 amino acid sequence of SEQ ID NO: 6078, a VLFWR3 amino acid sequence of SEQ ID NO: 6079, and/or a VLFWR4 amino acid sequence of SEQ ID NO: 6080.

[0442] In some embodiments, the antigen binding domain that targets NKp30 comprises a VL comprising a VLFWR1 amino acid sequence of SEQ ID NO: 6077 (or a sequence with no more than 1, 2, or 3 mutations, e.g., substitutions, additions, or deletions), a VLFWR2 amino acid sequence of SEQ ID NO: 6078 (or a sequence with no more than 1 mutation, e.g., substitution, addition, or deletion), a VLFWR3 amino acid sequence of SEQ ID NO: 6079 (or a sequence with no more than 1 mutation, e.g., substitution, addition, or deletion), and/or a VLFWR4 amino acid sequence of SEQ ID NO: 6080.

[0443] In some embodiments, the antigen binding domain that targets NKp30 comprises a VH comprising a heavy chain framework region 1 (VHFWR1) amino acid sequence of SEQ ID NO: 6018, a VHFWR2 amino acid sequence of SEQ ID NO: 6019, a VHFWR3 amino acid sequence of SEQ ID NO: 6020, and/or a VHFWR4 amino acid sequence of SEQ ID NO: 6021.

[0444] In some embodiments, the antigen binding domain that targets NKp30 comprises a VH comprising a VHFWR1 amino acid sequence of SEQ ID NO: 6018 (or a sequence with no more than 1, 2, 3, 4, 5, or 6 mutations, e.g., substitutions, additions, or deletions, therefrom), a VHFWR2 amino acid sequence of SEQ ID NO: 6019 (or a sequence with no more than 1, 2, 3, 4, 5, or 6 mutations, e.g., substitutions, additions, or deletions, therefrom), a VHFWR3 amino acid sequence of SEQ ID NO: 6020 (or a sequence with no more than 1, 2, 3, 4, 5, 6, 7, 8, 9, 10, or 11 mutations, e.g., substitutions, additions, or deletions), and/or a VHFWR4 amino acid sequence of SEQ ID NO: 6021.

[0445] In some embodiments, the antigen binding domain that targets NKp30 comprises a VL comprising a light chain framework region 1 (VLFWR1) amino acid sequence of SEQ ID NO: 6081, a VLFWR2 amino acid sequence of SEQ ID NO: 6082, a VLFWR3 amino acid sequence of SEQ ID NO: 6083, and/or a VLFWR4 amino acid sequence of SEQ ID NO: 6084.

[0446] In some embodiments, the antigen binding domain that targets NKp30 comprises a VL comprising a VLFWR1 amino acid sequence of SEQ ID NO: 6081 (or a sequence with no more than 1, 2, or 3 mutations, e.g., substitutions, additions, or deletions), a VLFWR2 amino acid sequence of SEQ ID NO: 6082 (or a sequence with no more than 1 mutation, e.g., substitution, addition, or deletion), a VLFWR3 amino acid sequence of SEQ ID NO: 6083 (or a sequence with no more than 1 mutation, e.g., substitution, addition, or deletion), and/or a VLFWR4 amino acid sequence of SEQ ID NO: 6084.

[0447] In some embodiments, the antigen binding domain that targets NKp30 comprises a VH comprising a heavy chain framework region 1 (VHFWR1) amino acid sequence of SEQ ID NO: 6022, a VHFWR2 amino acid sequence of SEQ ID NO: 6023, a VHFWR3 amino acid sequence of SEQ ID NO: 6024, and/or a VHFWR4 amino acid sequence of SEQ ID NO: 6025.

[0448] In some embodiments, the antigen binding domain that targets NKp30 comprises a VH comprising a VHFWR1 amino acid sequence of SEQ ID NO: 6022 (or a sequence with no more than 1, 2, 3, 4, 5, or 6 mutations, e.g., substitutions, additions, or deletions, therefrom), a VHFWR2 amino acid sequence of SEQ ID NO: 6023 (or a sequence with no more than 1, 2, 3, 4, 5, or 6 mutations, e.g., substitutions, additions, or deletions, therefrom), a VHFWR3 amino acid sequence of SEQ ID NO: 6024 (or a sequence with no more than 1, 2, 3, 4, 5, 6, 7, 8, 9, 10, or 11 mutations, e.g., substitutions, additions, or deletions), and/or a VHFWR4 amino acid sequence of SEQ ID NO: 6025.

[0449] In some embodiments, the antigen binding domain that targets NKp30 comprises a VL comprising a light chain framework region 1 (VLFWR1) amino acid sequence of SEQ ID NO: 6085, a VLFWR2 amino acid sequence of SEQ ID NO: 6086, a VLFWR3 amino acid sequence of SEQ ID NO: 6087, and/or a VLFWR4 amino acid sequence of SEQ ID NO: 6088.

[0450] In some embodiments, the antigen binding domain that targets NKp30 comprises a VL comprising a VLFWR1 amino acid sequence of SEQ ID NO: 6085 (or a sequence with no more than 1, 2, or 3 mutations, e.g., substitutions, additions, or deletions), a VLFWR2 amino acid sequence of SEQ ID NO: 6086 (or a sequence with no more than 1 mutation, e.g., substitution, addition, or deletion), a VLFWR3 amino acid sequence of SEQ ID NO: 6087 (or a sequence with no more than 1 mutation, e.g., substitution, addition, or deletion), and/or a VLFWR4 amino acid sequence of SEQ ID NO: 6088.

[0451] In some embodiments, the antigen binding domain that targets NKp30 comprises a VH comprising a heavy chain framework region 1 (VHFWR1) amino acid sequence of SEQ ID NO: 6026, a VHFWR2 amino acid sequence of SEQ ID NO: 6027, a VHFWR3 amino acid sequence of SEQ ID NO: 6028, and/or a VHFWR4 amino acid sequence of SEQ ID NO: 6029.

[0452] In some embodiments, the antigen binding domain that targets NKp30 comprises a VH comprising a VHFWR1 amino acid sequence of SEQ ID NO: 6026 (or a sequence with no more than 1, 2, 3, 4, 5, or 6 mutations, e.g., substitutions, additions, or deletions, therefrom), a VHFWR2 amino acid sequence of SEQ ID NO: 6027 (or a sequence with no more than 1, 2, 3, 4, 5, or 6 mutations, e.g., substitutions, additions, or deletions, therefrom), a VHFWR3 amino acid sequence of SEQ ID NO: 6028 (or a sequence with no more than 1, 2, 3, 4, 5, 6, 7, 8, 9, 10, or 11 mutations, e.g., substitutions, additions, or deletions), and/or a VHFWR4 amino acid sequence of SEQ ID NO: 6029.

[0453] In some embodiments, the antigen binding domain that targets NKp30 comprises a VL comprising a light chain framework region 1 (VLFWR1) amino acid sequence of SEQ ID NO: 6089, a VLFWR2 amino acid sequence of SEQ ID NO: 6090, a VLFWR3 amino acid sequence of SEQ ID NO: 6091, and/or a VLFWR4 amino acid sequence of SEQ ID NO: 6092.

[0454] In some embodiments, the antigen binding domain that targets NKp30 comprises a VL comprising a VLFWR1 amino acid sequence of SEQ ID NO: 6089 (or a sequence with no more than 1, 2, or 3 mutations, e.g., substitutions, additions, or deletions), a VLFWR2 amino acid sequence of SEQ ID NO: 6090 (or a sequence with no more than 1 mutation, e.g., substitution, addition, or deletion), a VLFWR3 amino acid sequence of SEQ ID NO: 6091 (or a sequence with no more than 1 mutation, e.g., substitution, addition, or deletion), and/or a VLFWR4 amino acid sequence of SEQ ID NO: 6092.

[0455] In some embodiments, the antigen binding domain that targets NKp30 comprises a VH comprising a heavy chain framework region 1 (VHFWR1) amino acid sequence of SEQ ID NO: 6030, a VHFWR2 amino acid sequence of SEQ ID NO: 6032, a VHFWR3 amino acid sequence of SEQ ID NO: 6033, and/or a VHFWR4 amino acid sequence of SEQ ID NO: 6034.

[0456] In some embodiments, the antigen binding domain that targets NKp30 comprises a VH comprising a VHFWR1 amino acid sequence of SEQ ID NO: 6030 (or a sequence with no more than 1, 2, 3, 4, 5, or 6 mutations, e.g., substitutions, additions, or deletions, therefrom), a VHFWR2 amino acid sequence of SEQ ID NO: 6032 (or a sequence with no more than 1, 2, 3, 4, 5, or 6 mutations, e.g., substitutions, additions, or deletions, therefrom), a VHFWR3 amino acid sequence of SEQ ID NO: 6033 (or a sequence with no more than 1, 2, 3, 4, 5, 6, 7, 8, 9, 10, or 11 mutations, e.g., substitutions, additions, or deletions), and/or a VHFWR4 amino acid sequence of SEQ ID NO: 6034.

[0457] In some embodiments, the antigen binding domain that targets NKp30 comprises a VL comprising a light chain framework region 1 (VLFWR1) amino acid sequence of SEQ ID NO: 6093, a VLFWR2 amino acid sequence of SEQ ID NO: 6094, a VLFWR3 amino acid sequence of SEQ ID NO: 6095, and/or a VLFWR4 amino acid sequence of SEQ ID NO: 6096.

[0458] In some embodiments, the antigen binding domain that targets NKp30 comprises a VL comprising a VLFWR1 amino acid sequence of SEQ ID NO: 6093 (or a sequence with no more than 1, 2, or 3 mutations, e.g., substitutions, additions, or deletions), a VLFWR2 amino acid sequence of SEQ ID NO: 6094 (or a sequence with no more than 1 mutation, e.g., substitution, addition, or deletion), a VLFWR3 amino acid sequence of SEQ ID NO: 6095 (or a sequence with no more than 1 mutation, e.g., substitution, addition, or deletion), and/or a VLFWR4 amino acid sequence of SEQ ID NO: 6096.

[0459] In some embodiments, the antigen binding domain that targets NKp30 comprises a VH comprising a heavy chain framework region 1 (VHFWR1) amino acid sequence of SEQ ID NO: 6035, a VHFWR2 amino acid sequence of SEQ ID NO: 6036, a VHFWR3 amino acid sequence of SEQ ID NO: 6037, and/or a VHFWR4 amino acid sequence of SEQ ID NO: 6038.

[0460] In some embodiments, the antigen binding domain that targets NKp30 comprises a VH comprising a VHFWR1 amino acid sequence of SEQ ID NO: 6035 (or a sequence with no more than 1, 2, 3, 4, 5, or 6 mutations, e.g., substitutions, additions, or deletions, therefrom), a VHFWR2 amino acid sequence of SEQ ID NO: 6036 (or a sequence with no more than 1, 2, 3, 4, 5, or 6 mutations, e.g., substitutions, additions, or deletions, therefrom), a VHFWR3 amino acid sequence of SEQ ID NO: 6037 (or a sequence with no more than 1, 2, 3, 4, 5, 6, 7, 8, 9, 10, or 11 mutations, e.g., substitutions, additions, or deletions), and/or a VHFWR4 amino acid sequence of SEQ ID NO: 6038.

[0461] In some embodiments, the antigen binding domain that targets NKp30 comprises a VH comprising a heavy chain framework region 1 (VHFWR1) amino acid sequence of SEQ ID NO: 6039, a VHFWR2 amino acid sequence of SEQ ID NO: 6040, a VHFWR3 amino acid sequence of SEQ ID NO: 6041, and/or a VHFWR4 amino acid sequence of SEQ ID NO: 6042.

[0462] In some embodiments, the antigen binding domain that targets NKp30 comprises a VH comprising a VHFWR1 amino acid sequence of SEQ ID NO: 6039 (or a sequence with no more than 1, 2, 3, 4, 5, or 6 mutations, e.g., substitutions, additions, or deletions, therefrom), a VHFWR2 amino acid sequence of SEQ ID NO: 6040 (or a sequence with no more than 1, 2, 3, 4, 5, or 6 mutations, e.g., substitutions, additions, or deletions, therefrom), a VHFWR3 amino acid sequence of SEQ ID NO: 6041 (or a sequence with no more than 1, 2, 3, 4, 5, 6, 7, 8, 9, 10, or 11 mutations, e.g., substitutions, additions, or deletions), and/or a VHFWR4 amino acid sequence of SEQ ID NO: 6042.

[0463] In some embodiments, the antigen binding domain that targets NKp30 comprises a VL comprising a light chain framework region 1 (VLFWR1) amino acid sequence of SEQ ID NO: 6097, a VLFWR2 amino acid sequence of SEQ ID NO: 6098, a VLFWR3 amino acid sequence of SEQ ID NO: 6099, and/or a VLFWR4 amino acid sequence of SEQ ID NO: 6100.

[0464] In some embodiments, the antigen binding domain that targets NKp30 comprises a VL comprising a VLFWR1 amino acid sequence of SEQ ID NO: 6097 (or a sequence with no more than 1, 2, or 3 mutations, e.g., substitutions, additions, or deletions), a VLFWR2 amino acid sequence of SEQ ID NO: 6098 (or a sequence with no more than 1 mutation, e.g., substitution, addition, or deletion), a VLFWR3 amino acid sequence of SEQ ID NO: 6099 (or a sequence with no more than 1 mutation, e.g., substitution, addition, or deletion), and/or a VLFWR4 amino acid sequence of SEQ ID NO: 6100.

[0465] In some embodiments, the antigen binding domain that targets NKp30 comprises a VH comprising a heavy chain framework region 1 (VHFWR1) amino acid sequence of SEQ ID NO: 6043, a VHFWR2 amino acid sequence of SEQ ID NO: 6044, a VHFWR3 amino acid sequence of SEQ ID NO: 6045, and/or a VHFWR4 amino acid sequence of SEQ ID NO: 6046.

[0466] In some embodiments, the antigen binding domain that targets NKp30 comprises a VH comprising a VHFWR1 amino acid sequence of SEQ ID NO: 6043 (or a sequence with no more than 1, 2, 3, 4, 5, or 6 mutations, e.g., substitutions, additions, or deletions, therefrom), a VHFWR2 amino acid sequence of SEQ ID NO: 6044 (or a sequence with no more than 1, 2, 3, 4, 5, or 6 mutations, e.g., substitutions, additions, or deletions, therefrom), a VHFWR3 amino acid sequence of SEQ ID NO: 6045 (or a sequence with no more than 1, 2, 3, 4, 5, 6, 7, 8, 9, 10, or 11 mutations, e.g., substitutions, additions, or deletions), and/or a VHFWR4 amino acid sequence of SEQ ID NO: 6046.

[0467] In some embodiments, the antigen binding domain that targets NKp30 comprises a VL comprising a light chain framework region 1 (VLFWR1) amino acid sequence of SEQ ID NO: 6101, a VLFWR2 amino acid sequence of SEQ ID NO: 6102, a VLFWR3 amino acid sequence of SEQ ID NO: 6103, and/or a VLFWR4 amino acid sequence of SEQ ID NO: 6104.

[0468] In some embodiments, the antigen binding domain that targets NKp30 comprises a VL comprising a VLFWR1 amino acid sequence of SEQ ID NO: 6101 (or a sequence with no more than 1, 2, or 3 mutations, e.g., substitutions, additions, or deletions), a VLFWR2 amino acid sequence of SEQ ID NO: 6102 (or a sequence with no more than 1 mutation, e.g., substitution, addition, or deletion), a VLFWR3 amino acid sequence of SEQ ID NO: 6103 (or a sequence with no more than 1 mutation, e.g., substitution, addition, or deletion), and/or a VLFWR4 amino acid sequence of SEQ ID NO: 6104.

[0469] In some embodiments, the antigen binding domain that targets NKp30 comprises a VH comprising a heavy chain framework region 1 (VHFWR1) amino acid sequence of SEQ ID NO: 6047, a VHFWR2 amino acid sequence of SEQ ID NO: 6048, a VHFWR3 amino acid sequence of SEQ ID NO: 6049, and/or a VHFWR4 amino acid sequence of SEQ ID NO: 6050.

[0470] In some embodiments, the antigen binding domain that targets NKp30 comprises a VH comprising a VHFWR1 amino acid sequence of SEQ ID NO: 6047 (or a sequence with no more than 1, 2, 3, 4, 5, or 6 mutations, e.g., substitutions, additions, or deletions, therefrom), a VHFWR2 amino acid sequence of SEQ ID NO: 6048 (or a sequence with no more than 1, 2, 3, 4, 5, or 6 mutations, e.g., substitutions, additions, or deletions, therefrom), a VHFWR3 amino acid sequence of SEQ ID NO: 6049 (or a sequence with no more than 1, 2, 3, 4, 5, 6, 7, 8, 9, 10, or 11 mutations, e.g., substitutions, additions, or deletions), and/or a VHFWR4 amino acid sequence of SEQ ID NO: 6050.

[0471] In some embodiments, the antigen binding domain that targets NKp30 comprises a VL comprising a light chain framework region 1 (VLFWR1) amino acid sequence of SEQ ID NO: 6105, a VLFWR2 amino acid sequence of SEQ ID NO: 6106, a VLFWR3 amino acid sequence of SEQ ID NO: 6107, and/or a VLFWR4 amino acid sequence of SEQ ID NO: 6108.

[0472] In some embodiments, the antigen binding domain that targets NKp30 comprises a VL comprising a VLFWR1 amino acid sequence of SEQ ID NO: 6105 (or a sequence with no more than 1, 2, or 3 mutations, e.g., substitutions, additions, or deletions), a VLFWR2 amino acid sequence of SEQ ID NO: 6106 (or a sequence with no more than 1 mutation, e.g., substitution, addition, or deletion), a VLFWR3 amino acid sequence of SEQ ID NO: 6107 (or a sequence with no more than 1 mutation, e.g., substitution, addition, or deletion), and/or a VLFWR4 amino acid sequence of SEQ ID NO: 6108.

[0473] In some embodiments, the antigen binding domain that targets NKp30 comprises a VH comprising a heavy chain framework region 1 (VHFWR1) amino acid sequence of SEQ ID NO: 6051, a VHFWR2 amino acid sequence of SEQ ID NO: 6052, a VHFWR3 amino acid sequence of SEQ ID NO: 6053, and/or a VHFWR4 amino acid sequence of SEQ ID NO: 6054.

[0474] In some embodiments, the antigen binding domain that targets NKp30 comprises a VH comprising a VHFWR1 amino acid sequence of SEQ ID NO: 6051 (or a sequence with no more than 1, 2, 3, 4, 5, or 6 mutations, e.g., substitutions, additions, or deletions, therefrom), a VHFWR2 amino acid sequence of SEQ ID NO: 6052 (or a sequence with no more than 1, 2, 3, 4, 5, or 6 mutations, e.g., substitutions, additions, or deletions, therefrom), a VHFWR3 amino acid sequence of SEQ ID NO: 6053 (or a sequence with no more than 1, 2, 3, 4, 5, 6, 7, 8, 9, 10, or 11 mutations, e.g., substitutions, additions, or deletions), and/or a VHFWR4 amino acid sequence of SEQ ID NO: 6054.

[0475] In some embodiments, the antigen binding domain that targets NKp30 comprises a VL comprising a light chain framework region 1 (VLFWR1) amino acid sequence of SEQ ID NO: 6109, a VLFWR2 amino acid sequence of SEQ ID NO: 6110, a VLFWR3 amino acid sequence of SEQ ID NO: 6111, and/or a VLFWR4 amino acid sequence of SEQ ID NO: 6112.

[0476] In some embodiments, the antigen binding domain that targets NKp30 comprises a VL comprising a VLFWR1 amino acid sequence of SEQ ID NO: 6109 (or a sequence with no more than 1, 2, or 3 mutations, e.g., substitutions, additions, or deletions), a VLFWR2 amino acid sequence of SEQ ID NO: 6110 (or a sequence with no more than 1 mutation, e.g., substitution, addition, or deletion), a VLFWR3 amino acid sequence of SEQ ID NO: 6111 (or a sequence with no more than 1 mutation, e.g., substitution, addition, or deletion), and/or a VLFWR4 amino acid sequence of SEQ ID NO: 6112.

[0477] In some embodiments, the antigen binding domain that targets NKp30 comprises a VH comprising a heavy chain framework region 1 (VHFWR1) amino acid sequence of SEQ ID NO: 6055, a VHFWR2 amino acid sequence of SEQ ID NO: 6056, a VHFWR3 amino acid sequence of SEQ ID NO: 6057, and/or a VHFWR4 amino acid sequence of SEQ ID NO: 6058.

[0478] In some embodiments, the antigen binding domain that targets NKp30 comprises a VH comprising a VHFWR1 amino acid sequence of SEQ ID NO: 6055 (or a sequence with no more than 1, 2, 3, 4, 5, or 6 mutations, e.g., substitutions, additions, or deletions, therefrom), a VHFWR2 amino acid sequence of SEQ ID NO: 6056 (or a sequence with no more than 1, 2, 3, 4, 5, or 6 mutations, e.g., substitutions, additions, or deletions, therefrom), a VHFWR3 amino acid sequence of SEQ ID NO: 6057 (or a sequence with no more than 1, 2, 3, 4, 5, 6, 7, 8, 9, 10, or 11 mutations, e.g., substitutions, additions, or deletions), and/or a VHFWR4 amino acid sequence of SEQ ID NO: 6058.

[0479] In some embodiments, the antigen binding domain that targets NKp30 comprises a VL comprising a light chain framework region 1 (VLFWR1) amino acid sequence of SEQ ID NO: 6113, a VLFWR2 amino acid sequence of SEQ ID NO: 6114, a VLFWR3 amino acid sequence of SEQ ID NO: 6115, and/or a VLFWR4 amino acid sequence of SEQ ID NO: 6116.

[0480] In some embodiments, the antigen binding domain that targets NKp30 comprises a VL comprising a VLFWR1 amino acid sequence of SEQ ID NO: 6113 (or a sequence with no more than 1, 2, or 3 mutations, e.g., substitutions, additions, or deletions), a VLFWR2 amino acid sequence of SEQ ID NO: 6114 (or a sequence with no more than 1 mutation, e.g., substitution, addition, or deletion), a VLFWR3 amino acid sequence of SEQ ID NO: 6115 (or a sequence with no more than 1 mutation, e.g., substitution, addition, or deletion), and/or a VLFWR4 amino acid sequence of SEQ ID NO: 6116.

[0481] In some embodiments, the antigen binding domain that targets NKp30 comprises a VH comprising a heavy chain framework region 1 (VHFWR1) amino acid sequence of SEQ ID NO: 6059, a VHFWR2 amino acid sequence of SEQ ID NO: 6060, a VHFWR3 amino acid sequence of SEQ ID NO: 6061, and/or a VHFWR4 amino acid sequence of SEQ ID NO: 6062.

[0482] In some embodiments, the antigen binding domain that targets NKp30 comprises a VH comprising a VHFWR1 amino acid sequence of SEQ ID NO: 6059 (or a sequence with no more than 1, 2, 3, 4, 5, or 6 mutations, e.g., substitutions, additions, or deletions, therefrom), a VHFWR2 amino acid sequence of SEQ ID NO: 6060 (or a sequence with no more than 1, 2, 3, 4, 5, or 6 mutations, e.g., substitutions, additions, or deletions, therefrom), a VHFWR3 amino acid sequence of SEQ ID NO: 6061 (or a sequence with no more than 1, 2, 3, 4, 5, 6, 7, 8, 9, 10, or 11 mutations, e.g., substitutions, additions, or deletions), and/or a VHFWR4 amino acid sequence of SEQ ID NO: 6062.

[0483] In some embodiments, the antigen binding domain that targets NKp30 comprises a VL comprising a light chain framework region 1 (VLFWR1) amino acid sequence of SEQ ID NO: 6117, a VLFWR2 amino acid sequence of SEQ ID NO: 6118, a VLFWR3 amino acid sequence of SEQ ID NO: 6119, and/or a VLFWR4 amino acid sequence of SEQ ID NO: 6120.

[0484] In some embodiments, the antigen binding domain that targets NKp30 comprises a VL comprising a VLFWR1 amino acid sequence of SEQ ID NO: 6117 (or a sequence with no more than 1, 2, or 3 mutations, e.g., substitutions, additions, or deletions), a VLFWR2 amino acid sequence of SEQ ID NO: 6118 (or a sequence with no more than 1 mutation, e.g., substitution, addition, or deletion), a VLFWR3 amino acid sequence of SEQ ID NO: 6119 (or a sequence with no more than 1 mutation, e.g., substitution, addition, or deletion), and/or a VLFWR4 amino acid sequence of SEQ ID NO: 6120.

[0485] In some embodiments, the antigen binding domain that targets NKp30 comprises a VH comprising the amino acid sequence of SEQ ID NO: 6148 (or an amino acid sequence having at least about 77%, 80%, 85%, 90%, 95%, or 99% sequence identity to SEQ ID NO: 6148). In some embodiments, the antigen binding domain that targets NKp30 comprises a VH comprising the amino acid sequence of SEQ ID NO: 6149 (or an amino acid sequence having at least about 77%, 80%, 85%, 90%, 95%, or 99% sequence identity to SEQ ID NO: 6149). In some embodiments, the antigen binding domain that targets NKp30 comprises a VL comprising the amino acid sequence of SEQ ID NO: 6150 (or an amino acid sequence having at least about 93%, 95%, or 99% sequence identity to SEQ ID NO: 6150). In some embodiments, antigen binding domain that targets NKp30 comprises a VH comprising the amino acid sequence of SEQ ID NO: 6148. In some embodiments, antigen binding domain that targets NKp30 comprises a VH comprising the amino acid sequence of SEQ ID NO: 6149. In some embodiments, the antigen binding domain that targets NKp30 comprises a VL comprising the amino acid sequence of SEQ ID NO: 6150.

[0486] In some embodiments, the antigen binding domain that targets NKp30 comprises a VH comprising the amino acid sequence of SEQ ID NO: 6148, and a VL comprising the amino acid sequence of SEQ ID NO: 6150. In some embodiments, the antigen binding domain that targets NKp30 comprises a VH comprising the amino acid sequence of SEQ ID NO: 6149, and a VL comprising the amino acid sequence of SEQ ID NO: 6150.

[0487] In some embodiments, the antigen binding domain that targets NKp30 comprises a VH comprising the amino acid sequence of SEQ ID NO: 6151 (or an amino acid sequence having at least about 77%, 80%, 85%, 90%, 95%, or 99% sequence identity to SEQ ID NO: 6151). In some embodiments, the antigen binding domain that targets NKp30 comprises a VH comprising the amino acid sequence of SEQ ID NO: 6152 (or an amino acid sequence having at least about 77%, 80%, 85%, 90%, 95%, or 99% sequence identity to SEQ ID NO: 6152). In some embodiments, the antigen binding domain that targets NKp30 comprises a VL comprising the amino acid sequence of SEQ ID NO: 6153 (or an amino acid sequence having at least about 93%, 95%, or 99% sequence identity to SEQ ID NO: 6153). In some embodiments, antigen binding domain that targets NKp30 comprises a VH comprising the amino acid sequence of SEQ ID NO: 6151. In some embodiments, antigen binding domain that targets NKp30 comprises a VH comprising the amino acid sequence of SEQ ID NO: 6152. In some embodiments, the antigen binding domain that targets NKp30 comprises a VL comprising the amino acid sequence of SEQ ID NO: 6153.

[0488] In some embodiments, the antigen binding domain that targets NKp30 comprises a VH comprising the amino acid sequence of SEQ ID NO: 6151, and a VL comprising the amino acid sequence of SEQ ID NO: 6153. In some embodiments, the antigen binding domain that targets NKp30 comprises a VH comprising the amino acid sequence of SEQ ID NO: 6152, and a VL comprising the amino acid sequence of SEQ ID NO: 6153.

[0489] In some embodiments, the antigen binding domain that targets NKp30 comprises an scFv. In some embodiments, the scFv comprises an amino acid sequence selected from SEQ ID NOs: 6187-6190, or an amino acid sequence having at least about 93%, 95%, or 99% sequence identity thereto.

TABLE 7
Exemplary heavy chain CDRs and FWRs of NKp30-targeting antigen binding domains

| Ab ID | VHFWR1 | VHCDR1 | VHFWR2 | VHCDR2 | VHFWR3 | VHCDR3 | VHFWR4 |
|---|---|---|---|---|---|---|---|
| 9G1- | QIQLQES | TGGYH | WIRQFP | YIYSSGS | RISITRD | GNWHY | WGQGT |
| HC | GPGLVK | WN (SEQ | GKKLEW | TSYNPSL | TSKNQF | FDF (SEQ | MVTVSS |
| | PSQSLSL | ID NO: | MG (SEQ | KS (SEQ | FLQLNS | ID NO: | (SEQ ID |
| | TCSVTG | 6000) | ID NO: | ID NO: | VTTEDT | 6002) | NO: 6006) |
| | FSIN | | 6004) | 6001) | ATYYCA | | |
| | (SEQ ID | | | | R (SEQ | | |
| | NO: 6003) | | | | ID NO: | | |
| | | | | | 6005) | | |
| 15H6- | QIQLQES | TGGYH | WIRQFP | YIYSSGT | RISITRD | GNWHY | WGQGTL |
| HC | GPGLVK | WN (SEQ | GKKLEW | TRYNPS | TSKNQF | FDY | VAVSS |
| | PSQSLSL | ID NO: | MG (SEQ | LKS | FLQLNS | (SEQ ID | (SEQ ID |
| | TCSVTG | 6007) | ID NO: | (SEQ ID | VTPEDT | NO: 6009) | NO: 6013) |
| | FSIN | | 6011) | NO: 6008) | ATYYCT | | |
| | (SEQ ID | | | | R (SEQ | | |
| | NO: 6010) | | | | ID NO: | | |
| | | | | | 6012) | | |
| 9G1- | QIQLQES | TGGYH | WIRQPA | YIYSSGS | RVTMSR | GNWHY | WGQGT |
| HC_1 | GPGLVK | WN (SEQ | GKGLEW | TSYNPSL | DTSKNQ | FDF (SEQ | MVTVSS |
| | PSETLSL | ID NO: | IG (SEQ | KS (SEQ | FSLKLSS | ID NO: | (SEQ ID |
| | TCTVSG | 6000) | ID NO: | ID NO: | VTAADT | 6002) | NO: 6017) |
| | FSIN | | 6015) | 6001) | AVYYCA | | |
| | (SEQ ID | | | | R (SEQ | | |
| | NO: 6014) | | | | ID NO: | | |
| | | | | | 6016) | | |
| 9G1- | QIQLQES | TGGYH | WIRQHP | YIYSSGS | LVTISRD | GNWHY | WGQGT |
| HC_2 | GPGLVK | WN (SEQ | GKGLEW | TSYNPSL | TSKNQF | FDF (SEQ | MVTVSS |
| | PSQTLSL | ID NO: | IG (SEQ | KS (SEQ | SLKLSSV | ID NO: | (SEQ ID |
| | TCTVSG | 6000) | ID NO: | ID NO: | TAADTA | 6002) | NO: 6021) |
| | FSIN | | 6019) | 6001) | VYYCAR | | |
| | (SEQ ID | | | | (SEQ ID | | |
| | NO: 6018) | | | | NO: 6020) | | |
| 9G1- | EIQLLES | TGGYH | WVRQAP | YIYSSGS | RFTISRD | GNWHY | WGQGT |
| HC_3 | GGGLVQ | WN (SEQ | GKGLEW | TSYNPSL | TSKNTF | FDF (SEQ | MVTVSS |
| | PGGSLR | ID NO: | VG (SEQ | KS (SEQ | YLQMNS | ID NO: | (SEQ ID |
| | LSCAVS | 6000) | ID NO: | ID NO: | LRAEDT | 6002) | NO: 6025) |
| | GFSIN | | 6023) | 6001) | AVYYCA | | |
| | (SEQ ID | | | | R (SEQ | | |
| | NO: 6022) | | | | ID NO: | | |
| | | | | | 6024) | | |
| 9G1- | QIQLVQ | TGGYH | WVRQAP | YIYSSGS | RVTITRD | GNWHY | WGQGT |
| HC_4 | SGAEVK | WN (SEQ | GQGLEW | TSYNPSL | TSTNTF | FDF (SEQ | MVTVSS |
| | KPGSSV | ID NO: | MG (SEQ | KS (SEQ | YMELSS | ID NO: | (SEQ ID |
| | KVSCKV | 6000) | ID NO: | ID NO: | LRSEDT | 6002) | NO: 6029) |
| | SGFSIN | | 6027) | 6001) | AVYYCA | | |
| | (SEQ ID | | | | R (SEQ | | |
| | NO: 6026) | | | | ID NO: | | |
| | | | | | 6028) | | |
| 9G1- | EIQLVES | TGGYH | WVRQAP | YIYSSGS | RFTISRD | GNWHY | WGQGT |
| HC_5 | GGGLVQ | WN (SEQ | GKGLEW | TSYNPSL | TAKNSF | FDF (SEQ | MVTVSS |
| | PGGSLR | ID NO: | VG (SEQ | KS (SEQ | YLQMNS | ID NO: | (SEQ ID |
| | LSCAVS | 6000) | ID NO: | ID NO: | LRAEDT | 6002) | NO: 6034) |
| | GFSIN | | 6032 | 6001) | AVYYCA | | |
| | (SEQ ID | | | | R (SEQ | | |
| | NO: 6030) | | | | ID NO: | | |
| | | | | | 6033) | | |
| 9G1- | QIQLVQ | TGGYH | WVRQAP | YIYSSGS | RVTMTR | GNWHY | WGQGT |
| HC_6 | SGAEVK | WN (SEQ | GQGLEW | TSYNPSL | DTSTNT | FDF (SEQ | MVTVSS |
| | KPGASV | ID NO: | MG (SEQ | KS (SEQ | FYMELS | ID NO: | (SEQ ID |
| | KVSCKV | 6000) | ID NO: | ID NO: | SLRSEDT | 6002) | NO: 6038) |
| | SGFSIN | | 6036) | 6001) | AVYYCA | | |
| | (SEQ ID | | | | R (SEQ | | |
| | NO: 6035) | | | | ID NO: | | |
| | | | | | 6037) | | |
| 15H6- | QIQLQES | TGGYH | WIRQHP | YIYSSGT | LVTISRD | GNWHY | WGQGTL |
| HC_1 | GPGLVK | WN (SEQ | GKGLEW | TRYNPS | TSKNQF | FDY | VTVSS |
| | PSQTLSL | ID NO: | IG (SEQ | LKS | SLKLSSV | (SEQ ID | (SEQ ID |
| | TCTVSG | 6007) | ID NO: | (SEQ ID | TAADTA | NO: 6009) | NO: 6042) |
| | FSIN | | 6040) | NO: 6008) | VYYCAR | | |
| | (SEQ ID | | | | (SEQ ID | | |
| | NO: 6039) | | | | NO: 6041) | | |
| 15H6- | QIQLQES | TGGYH | WIRQPA | YIYSSGT | RVTMSR | GNWHY | WGQGTL |
| HC_2 | GPGLVK | WN (SEQ | GKGLEW | TRYNPS | DTSKNQ | FDY | VTVSS |
| | PSETLSL | ID NO: | IG (SEQ | LKS | FSLKLSS | (SEQ ID | (SEQ ID |
| | TCTVSG | 6007) | ID NO: | (SEQ ID | VTAADT | NO: 6009) | NO: 6046) |
| | FSIN | | 6044) | NO: 6008) | AVYYCA | | |
| | (SEQ ID | | | | R (SEQ | | |
| | NO: 6043) | | | | ID NO: | | |
| | | | | | 6045) | | |
| 15H6- | EIQLLES | TGGYH | WVRQAP | YIYSSGT | RFTISRD | GNWHY | WGQGTL |
| HC_3 | GGGLVQ | WN (SEQ | GKGLEW | TRYNPS | TSKNTF | FDY | VTVSS |
| | PGGSLR | ID NO: | VG (SEQ | LKS | YLQMNS | (SEQ ID | (SEQ ID |
| | LSCAVS | 6007) | ID NO: | (SEQ ID | LRAEDT | NO: 6009) | NO: 6050) |
| | GFSIN | | 6048) | NO: 6008) | AVYYCA | | |
| | (SEQ ID | | | | R (SEQ | | |
| | NO: 6047) | | | | ID NO: | | |
| | | | | | 6049) | | |
| 15H6- | QIQLVES | TGGYH | WIRQAP | YIYSSGT | RFTISRD | GNWHY | WGQGTL |
| HC_4 | GGGLVK | WN (SEQ | GKGLEW | TRYNPS | TAKNSF | FDY | VTVSS |
| | PGGSLR | ID NO: | VG (SEQ | LKS | YLQMNS | (SEQ ID | (SEQ ID |
| | LSCAVS | 6007) | ID NO: | (SEQ ID | LRAEDT | NO: 6009) | NO: 6054) |
| | GFSIN | | 6052) | NO: 6008) | AVYYCA | | |
| | (SEQ ID | | | | R (SEQ | | |
| | NO: 6051) | | | | ID NO: | | |
| | | | | | 6053) | | |
| 15H6- | QIQLVQ | TGGYH | WVRQAP | YIYSSGT | RVTMTR | GNWHY | WGQGTL |
| HC_5 | SGAEVK | WN (SEQ | GQGLEW | TRYNPS | DTSTNT | FDY | VTVSS |
| | KPGASV | ID NO: | MG (SEQ | LKS | FYMELS | (SEQ ID | (SEQ ID |
| | KVSCKV | 6007) | ID NO: | (SEQ ID | SLRSEDT | NO: 6009) | NO: 6058) |
| | SGFSIN | | 6056) | NO: 6008) | AVYYCA | | |
| | (SEQ ID | | | | R (SEQ | | |
| | NO: 6055) | | | | ID NO: | | |
| | | | | | 6057) | | |
| 15H6- | EIQLVQS | TGGYH | WVQQA | YIYSSGT | RVTITRD | GNWHY | WGQGTL |
| HC_6 | GAEVKK | WN (SEQ | PGKGLE | TRYNPS | TSTNTF | FDY | VTVSS |
| | PGATVK | ID NO: | WMG | LKS | YMELSS | (SEQ ID | (SEQ ID |
| | ISCKVSG | 6007) | (SEQ ID | (SEQ ID | LRSEDT | NO: 6009) | NO: 6062) |
| | FSIN | | NO: 6060) | NO: 6008) | AVYYCA | | |
| | (SEQ ID | | | | R (SEQ | | |
| | NO: 6059) | | | | ID NO: | | |
| | | | | | 6061) | | |

TABLE 18
Exemplary heavy chain CDRs and FWRs of NKp30-targeting antigen binding domains
(according to the Kabat numbering scheme)

| Ab ID | VHFWR1 | VHCDR1 | VHFWR2 | VHCDR2 | VHFWR3 | VHCDR3 | VHFWR4 |
|---|---|---|---|---|---|---|---|
| 9G1- | QIQLQES | GYHWN | WIRQFP | YIYSSGS | RISITRD | GNWHY | WGQGT |
| HC | GPGLVK | (SEQ ID | GKKLEW | TSYNPSL | TSKNQF | FDF (SEQ | MVTVSS |
| | PSQSLSL | NO: 7313) | MG (SEQ | KS (SEQ | FLQLNS | ID NO: | (SEQ ID |
| | TCSVTG | | ID NO: | ID NO: | VTTEDT | 6002) | NO: 6006) |
| | FSINTG | | 6004) | 6001) | ATYYCA | | |
| | (SEQ ID | | | | R (SEQ | | |
| | NO: 7317) | | | | ID NO: | | |
| | | | | | 6005) | | |
| 15H6- | QIQLQES | GYHWN | WIRQFP | YIYSSGT | RISITRD | GNWHY | WGQGTL |
| HC | GPGLVK | (SEQ ID | GKKLEW | TRYNPS | TSKNQF | FDY | VAVSS |
| | PSQSLSL | NO: 7313) | MG (SEQ | LKS | FLQLNS | (SEQ ID | (SEQ ID |
| | TCSVTG | | ID NO: | (SEQ ID | VTPEDT | NO: 6009) | NO: 6013) |
| | FSINTG | | 6011) | NO: 6008) | ATYYCT | | |
| | (SEQ ID | | | | R (SEQ | | |
| | NO: 7317) | | | | ID NO: | | |
| | | | | | 6012) | | |
| 9G1- | QIQLQES | GYHWN | WIRQPA | YIYSSGS | RVTMSR | GNWHY | WGQGT |
| HC_1 | GPGLVK | (SEQ ID | GKGLEW | TSYNPSL | DTSKNQ | FDF (SEQ | MVTVSS |
| | PSETLSL | NO: 7313) | IG (SEQ | KS (SEQ | FSLKLSS | ID NO: | (SEQ ID |
| | TCTVSG | | ID NO: | ID NO: | VTAADT | 6002) | NO: 6017) |
| | FSINTG | | 6015) | 6001) | AVYYCA | | |
| | (SEQ ID | | | | R (SEQ | | |
| | NO: 7371) | | | | ID NO: | | |
| | | | | | 6016) | | |
| 9G1- | QIQLQES | GYHWN | WIRQHP | YIYSSGS | LVTISRD | GNWHY | WGQGT |
| HC_2 | GPGLVK | (SEQ ID | GKGLEW | TSYNPSL | TSKNQF | FDF (SEQ | MVTVSS |
| | PSQTLSL | NO: 7313) | IG (SEQ | KS (SEQ | SLKLSSV | ID NO: | (SEQ ID |
| | TCTVSG | | ID NO: | ID NO: | TAADTA | 6002) | NO: 6021) |
| | FSINTG | | 6019) | 6001) | VYYCAR | | |
| | (SEQ ID | | | | (SEQ ID | | |
| | NO: 7372) | | | | NO: 6020) | | |
| 9G1- | EIQLLES | GYHWN | WVRQAP | YIYSSGS | RFTISRD | GNWHY | WGQGT |
| HC_3 | GGGLVQ | (SEQ ID | GKGLEW | TSYNPSL | TSKNTF | FDF (SEQ | MVTVSS |
| | PGGSLR | NO: 7313) | VG (SEQ | KS (SEQ | YLQMNS | ID NO: | (SEQ ID |
| | LSCAVS | | ID NO: | ID NO: | LRAEDT | 6002) | NO: 6025) |
| | GFSINTG | | 6023) | 6001) | AVYYCA | | |
| | (SEQ ID | | | | R (SEQ | | |
| | NO: 7373) | | | | ID NO: | | |
| | | | | | 6024) | | |
| 9G1- | QIQLVQ | GYHWN | WVRQAP | YIYSSGS | RVTITRD | GNWHY | WGQGT |
| HC_4 | SGAEVK | (SEQ ID | GQGLEW | TSYNPSL | TSTNTF | FDF (SEQ | MVTVSS |
| | KPGSSV | NO: 7313) | MG (SEQ | KS (SEQ | YMELSS | ID NO: | (SEQ ID |
| | KVSCKV | | ID NO: | ID NO: | LRSEDT | 6002) | NO: 6029) |
| | SGFSINT | | 6027) | 6001) | AVYYCA | | |
| | G (SEQ | | | | R (SEQ | | |
| | ID NO: | | | | ID NO: | | |
| | 7374 | | | | 6028) | | |
| 9G1- | EIQLVES | GYHWN | WVRQAP | YIYSSGS | RFTISRD | GNWHY | WGQGT |
| HC_5 | GGGLVQ | (SEQ ID | GKGLEW | TSYNPSL | TAKNSF | FDF (SEQ | MVTVSS |
| | PGGSLR | NO: 7313) | VG (SEQ | KS (SEQ | YLQMNS | ID NO: | (SEQ ID |
| | LSCAVS | | ID NO: | ID NO: | LRAEDT | 6002) | NO: 6034) |
| | GFSINTG | | 6032) | 6001) | AVYYCA | | |
| | (SEQ ID | | | | R (SEQ | | |
| | NO: 7375) | | | | ID NO: | | |
| | | | | | 6033) | | |
| 9G1- | QIQLVQ | GYHWN | WVRQAP | YIYSSGS | RVTMTR | GNWHY | WGQGT |
| HC_6 | SGAEVK | (SEQ ID | GQGLEW | TSYNPSL | DTSTNT | FDF (SEQ | MVTVSS |
| | KPGASV | NO: 7313) | MG (SEQ | KS (SEQ | FYMELS | ID NO: | (SEQ ID |
| | KVSCKV | | ID NO: | ID NO: | SLRSEDT | 6002) | NO: 6038) |
| | SGFSINT | | 6036) | 6001) | AVYYCA | | |
| | G (SEQ | | | | R (SEQ | | |
| | ID NO: | | | | ID NO: | | |
| | 7376) | | | | 6037) | | |
| 15H6- | QIQLQES | GYHWN | WIRQHP | YIYSSGT | LVTISRD | GNWHY | WGQGTL |
| HC_1 | GPGLVK | (SEQ ID | GKGLEW | TRYNPS | TSKNQF | FDY | VTVSS |
| | PSQTLSL | NO: 7313) | IG (SEQ | LKS | SLKLSSV | (SEQ ID | (SEQ ID |
| | TCTVSG | | ID NO: | (SEQ ID | TAADTA | NO: 6009) | NO: 6042) |
| | FSINTG | | 6040) | NO: 6008) | VYYCAR | | |
| | (SEQ ID | | | | (SEQ ID | | |
| | NO: 7372) | | | | NO: 6041) | | |
| 15H6- | QIQLQES | GYHWN | WIRQPA | YIYSSGT | RVTMSR | GNWHY | WGQGTL |
| HC_2 | GPGLVK | (SEQ ID | GKGLEW | TRYNPS | DTSKNQ | FDY | VTVSS |
| | PSETLSL | NO: 7313) | IG (SEQ | LKS | FSLKLSS | (SEQ ID | (SEQ ID |
| | TCTVSG | | ID NO: | (SEQ ID | VTAADT | NO: 6009) | NO: 6046) |
| | FSINTG | | 6044) | NO: 6008) | AVYYCA | | |
| | (SEQ ID | | | | R (SEQ | | |
| | NO: 7371) | | | | ID NO: | | |
| | | | | | 6045) | | |
| 15H6- | EIQLLES | GYHWN | WVRQAP | YIYSSGT | RFTISRD | GNWHY | WGQGTL |
| HC_3 | GGGLVQ | (SEQ ID | GKGLEW | TRYNPS | TSKNTF | FDY | VTVSS |
| | PGGSLR | NO: 7313) | VG (SEQ | LKS | YLQMNS | (SEQ ID | (SEQ ID |
| | LSCAVS | | ID NO: | (SEQ ID | LRAEDT | NO: 6009) | NO: 6050) |
| | GFSINTG | | 6048) | NO: 6008) | AVYYCA | | |
| | (SEQ ID | | | | R (SEQ | | |
| | NO: 7373) | | | | ID NO: | | |
| | | | | | 6049) | | |
| 15H6- | QIQLVES | GYHWN | WIRQAP | YIYSSGT | RFTISRD | GNWHY | WGQGTL |
| HC_4 | GGGLVK | (SEQ ID | GKGLEW | TRYNPS | TAKNSF | FDY | VTVSS |
| | PGGSLR | NO: 7313) | VG (SEQ | LKS | YLQMNS | (SEQ ID | (SEQ ID |
| | LSCAVS | | ID NO: | (SEQ ID | LRAEDT | NO: 6009) | NO: 6054) |
| | GFSINTG | | 6052) | NO: 6008) | AVYYCA | | |
| | (SEQ ID | | | | R (SEQ | | |
| | NO: 7377) | | | | ID NO: | | |
| | | | | | 6053) | | |
| 15H6- | QIQLVQ | GYHWN | WVRQAP | YIYSSGT | RVTMTR | GNWHY | WGQGTL |
| HC_5 | SGAEVK | (SEQ ID | GQGLEW | TRYNPS | DTSTNT | FDY | VTVSS |
| | KPGASV | NO: 7313) | MG (SEQ | LKS | FYMELS | (SEQ ID | (SEQ ID |
| | KVSCKV | | ID NO: | (SEQ ID | SLRSEDT | NO: 6009) | NO: 6058) |
| | SGFSINT | | 6056) | NO: 6008) | AVYYCA | | |
| | G (SEQ | | | | R (SEQ | | |
| | ID NO: | | | | ID NO: | | |
| | 7376) | | | | 6057) | | |
| 15H6 | EIQLVQS | GYHWN | WVQQA | YIYSSGT | RVTITRD | GNWHY | WGQGTL |
| HC 6 | GAEVKK | (SEQ ID | PGKGLE | TRYNPS | TSTNTF | FDY | VTVSS |
| | PGATVK | NO: 7313) | WMG | LKS | YMELSS | (SEQ ID | (SEQ ID |
| | ISCKVSG | | (SEQ ID | (SEQ ID | LRSEDT | NO: 6009) | NO: 6062) |
| | FSINTG | | NO: | NO: 6008) | AVYYCA | | |
| | (SEQ ID | | 6060) | | R (SEQ | | |
| | NO: 7378) | | | | ID NO: | | |
| | | | | | 6061) | | |
| 9D9- | QIQLQES | GYHWN | WIRQFP | YIYSSGT | RISITRD | GDWHY | WGQGT |
| HC | GPGLVK | (SEQ ID | GKKVE | TKYNPS | TSKNQF | FDY | MVAVSS |
| | PSQSLSL | NO: 7313) | WMG | LKS | FLQLNS | (SEQ ID | (SEQ ID |
| | SCSVTG | | (SEQ ID | (SEQ ID | VTTEDT | NO: 7315) | NO: 7316) |
| | FSINTG | | NO: | NO: 7385) | ATYYCA | | |
| | (SEQ ID | | 7314) | | R (SEQ | | |
| | NO: 7312) | | | | ID NO: | | |
| | | | | | 6005) | | |
| 3A12- | QIQLQES | GYHWN | WIRQFP | YIYSSGS | RFSITRD | GNWHY | WGQGTL |
| HC | GPGLVK | (SEQ ID | GKKLEW | TRYNPS | TSKNQF | FDY | VAVSS |
| | PSQSLSL | NO: 7313) | MG (SEQ | LKS | FLQLNS | (SEQ ID | (SEQ ID |
| | TCSVTG | | ID NO: | (SEQ ID | VTTEDT | NO: 6009) | NO: 6013) |
| | FSINTG | | 6004) | NO: 7318) | ATYYCT | | |
| | (SEQ ID | | | | R (SEQ | | |
| | NO: 7317) | | | | ID NO: | | |
| | | | | | 7319) | | |
| 12D10- | QIQLQES | GYHWN | WIRQFP | YIYSSGT | RISITRD | GNWHY | WGQGTL |
| HC | GPGLVK | (SEQ ID | GKKLEW | TRYNPS | TSKNQF | FDY | VAVSS |
| | PSQSLSL | NO: 7313) | MG (SEQ | LKS | FLQLNS | (SEQ ID | (SEQ ID |
| | TCSVTG | | ID NO: | (SEQ ID | VTPEDT | NO: 6009) | NO: 6013) |
| | FSINTG | | 6004) | NO: 6008) | ATYYCT | | |
| | (SEQ ID | | | | R (SEQ | | |
| | NO: 7317) | | | | ID NO: | | |
| | | | | | 6012) | | |
| 15E1- | QIQLQES | GYHWN | WIRQFP | YIYSSGS | RFSITRD | GDWHY | WGPGT |
| HC | GPGLVK | (SEQ ID | GKKLEW | TSYNPSL | TSKNQF | FDY | MVTVSS |
| | PSQSLSL | NO: 7313) | MG (SEQ | KS (SEQ | FLQLNS | (SEQ ID | (SEQ ID |
| | SCSVTG | | ID NO: | ID NO: | VTTEDT | NO: 7315) | NO: 7324) |
| | FSITTT | | 6004) | 6001) | ATYYCA | | |
| | (SEQ ID | | | | R (SEQ | | |
| | NO: 7322) | | | | ID NO: | | |
| | | | | | 7323) | | |
| 15E1 | QIQLQES | GYHWN | WIRQHP | YIYSSGS | LVTISRD | GDWHY | WGQGT |
| Humanized | GPGLVK | (SEQ ID | GKGLEW | TSYNPSL | TSKNQF | FDY | MVTVSS |
| variant | PSQTLSL | NO: 7313) | IG (SEQ | KS (SEQ | SLKLSSV | (SEQ ID | (SEQ ID |
| VH1 | TCTVSG | | ID NO: | ID NO: | TAADTA | NO: 7315) | NO: 6006) |
| | FSITTT | | 6019) | 6001) | VYYCAR | | |
| | (SEQ ID | | | | (SEQ ID | | |
| | NO: 7330) | | | | NO: 6020) | | |
| 15E1 | QIQLVES | GYHWN | WIRQAP | YIYSSGS | RFTISRD | GDWHY | WGQGT |
| Humanized | GGGLVK | (SEQ ID | GKGLEW | TSYNPSL | TAKNSF | FDY | MVTVSS |
| variant | PGGSLR | NO: 7313) | VG (SEQ | KS (SEQ | YLQMNS | (SEQ ID | (SEQ ID |
| VH2 | LSCAVS | | ID NO: | ID NO: | LRAEDT | NO: 7315) | NO: 6006) |
| | GFSITTT | | 6052) | 6001) | AVYYCA | | |
| | (SEQ ID | | | | R (SEQ | | |
| | NO: 7331) | | | | ID NO: | | |
| | | | | | 6033) | | |
| 15E1 | EIQLLES | GYHWN | WVRQAP | YIYSSGS | RFTISRD | GDWHY | WGQGT |
| Humanized | GGGLVQ | (SEQ ID | GKGLEW | TSYNPSL | TSKNTF | FDY | MVTVSS |
| variant | PGGSLR | NO: 7313) | VG (SEQ | KS (SEQ | YLQMNS | (SEQ ID | (SEQ ID |
| VH3 | LSCAVS | | ID NO: | ID NO: | LRAEDT | NO: 7315) | NO: 6006) |
| | GFSITTT | | 6023) | 6001) | AVYYCA | | |
| | (SEQ ID | | | | R (SEQ | | |
| | NO: 7332) | | | | ID NO: | | |
| | | | | | 6024) | | |
| 15E1 | EIQLVES | GYHWN | WVRQAP | YIYSSGS | RFTISRD | GDWHY | WGQGT |
| Humanized | GGGLVQ | (SEQ ID | GKGLEW | TSYNPSL | TAKNSF | FDY | MVTVSS |
| variant | PGGSLR | NO: 7313) | VG (SEQ | KS (SEQ | YLQMNS | (SEQ ID | (SEQ ID |
| VH4 | LSCAVS | | ID NO: | ID NO: | LRAEDT | NO: 7315) | NO: 6006) |
| | GFSITTT | | 6023) | 6001) | AVYYCA | | |
| | (SEQ ID | | | | R (SEQ | | |
| | NO: 7333) | | | | ID NO: | | |
| | | | | | 6033) | | |
| 15E1 | QIQLVQ | GYHWN | WVRQAP | YIYSSGS | RVTMTR | GDWHY | WGQGT |
| Humanized | SGAEVK | (SEQ ID | GQGLEW | TSYNPSL | DTSTNT | FDY | MVTVSS |
| variant | KPGASV | NO: 7313) | MG (SEQ | KS (SEQ | FYMELS | (SEQ ID | (SEQ ID |
| VH5 | KVSCKV | | ID NO: | ID NO: | SLRSEDT | NO: 7315) | NO: 6006) |
| | SGFSITT | | 6027) | 6001) | AVYYCA | | |
| | T (SEQ | | | | R (SEQ | | |
| | ID NO: | | | | ID NO: | | |
| | 7334) | | | | 6037) | | |

TABLE 8
Exemplary light chain CDRs and FWRs of NKp30-targeting antigen binding domains

| Ab ID | VLFWR1 | VLCDR1 | VLFWR2 | VLCDR2 | VLFWR3 | VLCDR3 | VLFWR4 |
|---|---|---|---|---|---|---|---|
| 9G1- | SYTLTQ | SGERLS | WYQQK | ENDKRP | GIPDQFS | QSWDST | FGSGTQ |
| LC | PPLLSVA | DKYVH | PGRAPV | S (SEQ ID | GSNSGNI | NSAV | LTVL |
| | LGHKAT | (SEQ ID | MVIY | NO: 6064) | ATLTISK | (SEQ ID | (SEQ ID |
| | ITC (SEQ | NO: 6063) | (SEQ ID | | AQAGYE | NO: 7293) | NO: 6069) |
| | ID NO: | | NO: 6067) | | ADYYC | | |
| | 6066) | | | | (SEQ ID | | |
| | | | | | NO: 7292) | | |
| 15H6- | SYTLTQ | SGENLS | WYQQK | ENEKRP | GIPDQFS | HYWESI | FGSGTH |
| LC | PPSLSVA | DKYVH | PGRAPV | S (SEQ ID | GSNSGNI | NSVV | LTVL |
| | PGQKAT | (SEQ ID | MVIY | NO: 6071) | ATLTISK | (SEQ ID | (SEQ ID |
| | IIC (SEQ | NO: 6070) | (SEQ ID | | AQPGSE | NO: 6072) | NO: 6076) |
| | ID NO: | | NO: 6074) | | ADYYC | | |
| | 6073) | | | | (SEQ ID | | |
| | | | | | NO: 6075) | | |
| 9G1- | QSVTTQ | SGERLS | WYQQLP | ENDKRP | GVPDRF | QSWDST | FGGGTQ |
| LC_1 | PPSVSG | DKYVH | GTAPKM | S (SEQ ID | SGSNSG | NSAV | LTVL |
| | APGQRV | (SEQ ID | LIY (SEQ | NO: 6064) | NSASLAI | (SEQ ID | (SEQ ID |
| | TISC | NO: 6063) | ID NO: | | TGLQAE | NO: 7293) | NO: 6080) |
| | (SEQ ID | | 6078) | | DEADYY | | |
| | NO: 6077) | | | | C (SEQ | | |
| | | | | | ID NO: | | |
| | | | | | 6079) | | |
| 9G1- | QSVTTQ | SGERLS | WYQQLP | ENDKRP | GVPDRF | QSWDST | FGGGTQ |
| LC_2 | PPSASGT | DKYVH | GTAPKM | S (SEQ ID | SGSNSG | NSAV | LTVL |
| | PGQRVTI | (SEQ ID | LIY (SEQ | NO: 6064) | NSASLAI | (SEQ ID | (SEQ ID |
| | SC (SEQ | NO: 6063) | ID NO: | | SGLQSE | NO: 7293) | NO: 6084) |
| | ID NO: | | 6082) | | DEADYY | | |
| | 6081) | | | | C (SEQ | | |
| | | | | | ID NO: | | |
| | | | | | 6083) | | |
| 9G1- | QSVTTQ | SGERLS | WYQQLP | ENDKRP | GVPDRF | QSWDST | FGGGTQ |
| LC_3 | PPSASGT | DKYVH | GTAPKM | S (SEQ ID | SGSNSG | NSAV | LTVL |
| | PGQRVTI | (SEQ ID | LIY (SEQ | NO: 6064) | NSASLAI | (SEQ ID | (SEQ ID |
| | SC (SEQ | NO: 6063) | ID NO: | | SGLRSE | NO: 7293) | NO: 6088) |
| | ID NO: | | 6086) | | DEADYY | | |
| | 6085) | | | | C (SEQ | | |
| | | | | | ID NO: | | |
| | | | | | 6087) | | |
| 9G1- | SSETTQP | SGERLS | WYQQK | ENDKRP | GIPERFS | QSWDST | FGGGTQ |
| LC_4 | HSVSVA | DKYVH | PGQDPV | S (SEQ ID | GSNPGN | NSAV | LTVL |
| | TAQMAR | (SEQ ID | MVIY | NO: 6064) | TATLTIS | (SEQ ID | (SEQ ID |
| | ITC (SEQ | NO: 6063) | (SEQ ID | | RIEAGD | NO: 7293) | NO: 6092) |
| | ID NO: | | NO: 6090) | | EADYYC | | |
| | 6089) | | | | (SEQ ID | | |
| | | | | | NO: 6091) | | |
| 9G1- | DIQMTQ | SGERLS | WYQQK | ENDKRP | GVPSRFS | QSWDST | FGQGTK |
| LC_5 | SPSTLSA | DKYVH | PGKAPK | S (SEQ ID | GSNSGN | NSAV | VEIK |
| | SVGDRV | (SEQ ID | MLIY | NO: 6064) | EATLTIS | (SEQ ID | (SEQ ID |
| | TITC | NO: 6063) | (SEQ ID | | SLQPDD | NO: 7293) | NO: 6096) |
| | (SEQ ID | | NO: 6094) | | FATYYC | | |
| | NO: 6093) | | | | (SEQ ID | | |
| | | | | | NO: 6095) | | |
| 15H6- | QYVLTQ | SGENLS | WYQQLP | ENEKRP | GVPDRF | HYWESI | FGEGTE |
| LC_1 | PPSASGT | DKYVH | GTAPKM | S (SEQ ID | SGSNSG | NSVV | LTVL |
| | PGQRVTI | (SEQ ID | LIY (SEQ | NO: 6071) | NSASLAI | (SEQ ID | (SEQ ID |
| | SC (SEQ | NO: 6070) | ID NO: | | SGLQSE | NO: 6072) | NO: 6100) |
| | ID NO: | | 6098) | | DEADYY | | |
| | 6097) | | | | C (SEQ | | |
| | | | | | ID NO: | | |
| | | | | | 6099) | | |
| 15H6- | QYVLTQ | SGENLS | WYQQLP | ENEKRP | GVPDRF | HYWESI | FGEGTE |
| LC_2 | PPSASGT | DKYVH | GTAPKM | S (SEQ ID | SGSNSG | NSVV | LTVL |
| | PGQRVTI | (SEQ ID | LIY (SEQ | NO: 6071) | NSASLAI | (SEQ ID | (SEQ ID |
| | SC (SEQ | NO: 6070) | ID NO: | | SGLRSE | NO: 6072) | NO: 6104) |
| | ID NO: | | 6102) | | DEADYY | | |
| | 6101) | | | | C (SEQ | | |
| | | | | | ID NO: | | |
| | | | | | 6103) | | |
| 15H6- | SYELTQ | SGENLS | WYQQK | ENEKRP | GIPERFS | HYWESI | FGEGTE |
| LC_3 | PPSVSVS | DKYVH | PGQSPV | S (SEQ ID | GSNSGN | NSVV | LTVL |
| | PGQTASI | (SEQ ID | MVIY | NO: 6071) | TATLTIS | (SEQ ID | (SEQ ID |
| | TC (SEQ | NO: 6070) | (SEQ ID | | GTQAM | NO: 6072) | NO: 6108) |
| | ID NO: | | NO: 6106) | | DEADYY | | |
| | 6105) | | | | C (SEQ | | |
| | | | | | ID NO: | | |
| | | | | | 6107) | | |
| 15H6- | DYVLTQ | SGENLS | WYLQKP | ENEKRP | GVPDRF | HYWESI | FGQGTK |
| LC_4 | SPLSLPV | DKYVH | GQSPQM | S (SEQ ID | SGSNSG | NSVV | VEIK |
| | TPGEPAS | (SEQ ID | LIY (SEQ | NO: 6071) | NDATLK | (SEQ ID | (SEQ ID |
| | ISC (SEQ | NO: 6070) | ID NO: | | ISRVEAE | NO: 6072) | NO: 6112) |
| | ID NO: | | 6110) | | DVGVYY | | |
| | 6109) | | | | C (SEQ | | |
| | | | | | ID NO: | | |
| | | | | | 6111) | | |
| 15H6- | AYQLTQ | SGENLS | WYQQK | ENEKRP | GVPSRFS | HYWESI | FGQGTK |
| LC_5 | SPSSLSA | DKYVH | PGKAPK | S (SEQ ID | GSNSGN | NSVV | VEIK |
| | SVGDRV | (SEQ ID | MLIY | NO: 6071) | DATLTIS | (SEQ ID | (SEQ ID |
| | TITC | NO: 6070) | (SEQ ID | | SLQPEDF | NO: 6072) | NO: 6116) |
| | (SEQ ID | | NO: 6114) | | ATYYC | | |
| | NO: 6113) | | | | (SEQ ID | | |
| | | | | | NO: 6115) | | |
| 15H6- | EYVLTQ | SGENLS | WYQQK | ENEKRP | GIPARFS | HYWESI | FGQGTK |
| LC_6 | SPATLSV | DKYVH | PGQAPR | S (SEQ ID | GSNSGN | NSVV | VEIK |
| | SPGERA | (SEQ ID | MLIY | NO: 6071) | EATLTIS | (SEQ ID | (SEQ ID |
| | TLSC | NO: 6070) | (SEQ ID | | SLQSEDF | NO: 6072) | NO: 6120) |
| | (SEQ ID | | NO: 6118 | | AVYYC | | |
| | NO: 6117) | | | | (SEQ ID | | |
| | | | | | NO: 6119) | | |
| 9D9- | SYTLTQ | SGENLS | WYQQK | ENDKRP | GIPDQFS | HCWDST | FGSGTH |
| LC | PPLVSV | DKYVH | PGRAPV | S (SEQ ID | GSNSGNI | NSAV | LTVL |
| | ALGQKA | (SEQ ID | MVIY | NO: 6064) | ATLTISK | (SEQ ID | (SEQ ID |
| | TIIC | NO: 6070) | (SEQ ID | | AQAGYE | NO: 7321) | NO: 6076) |
| | (SEQ ID | | NO: 6067) | | ADYYC | | |
| | NO: 7320) | | | | (SEQ ID | | |
| | | | | | NO: 7292) | | |
| 3A12- | SYTLTQ | SGENLS | WYQQK | ENDKRP | GIPDQFS | HCWDST | FGSGTH |
| LC | PPLVSV | DKYVH | PGRAPV | S (SEQ ID | GSNSGNI | NSAV | LTVL |
| | ALGQKA | (SEQ ID | MVIY | NO: 6064) | ATLTISK | (SEQ ID | (SEQ ID |
| | TIIC | NO: 6070) | (SEQ ID | | AQAGYE | NO: 7321) | NO: 6076) |
| | (SEQ ID | | NO: 6067) | | ADYYC | | |
| | NO: 7320) | | | | (SEQ ID | | |
| | | | | | NO: 7292) | | |
| 12D10- | SYTLTQ | SGENLS | WYQQK | ENEKRP | GIPDQFS | HYWESI | FGSGTH |
| LC | PPSLSVA | DKYVH | PGRAPV | S (SEQ ID | GSNSGNI | NSVV | LTVL |
| | PGQKAT | (SEQ ID | MVIY | NO: 6071) | ATLTISK | (SEQ ID | (SEQ ID |
| | IIC (SEQ | NO: 6070) | (SEQ ID | | AQPGSE | NO: 6072) | NO: 6076) |
| | ID NO: | | NO: 6074) | | ADYYC | | |
| | 6073) | | | | (SEQ ID | | |
| | | | | | NO: 6075) | | |
| 15E1- | SFTLTQP | SGEKLS | WYQQK | ENDRRP | GIPDQFS | QFWDST | FGGGTQ |
| LC | PLVSVA | DKYVH | PGRAPV | S (SEQ ID | GSNSGNI | NSAV | LTVL |
| | VGQVAT | (SEQ ID | MVIY | NO: 7327) | ASLTISK | (SEQ ID | (SEQ ID |
| | ITC (SEQ | NO: 7326) | (SEQ ID | | AQAGDE | NO: 7329) | NO: 6080) |
| | ID NO: | | NO: 6067) | | ADYFC | | |
| | 7325) | | | | (SEQ ID | | |
| | | | | | NO: 7328) | | |
| 15E1 | SSETTQP | SGEKLS | WYQQK | ENDRRP | GIPERFS | QFWDST | FGGGTQ |
| Human- | PSVSVSP | DKYVH | PGQSPV | S (SEQ ID | GSNSGN | NSAV | LTVL |
| ized | GQTASIT | (SEQ ID | MVIY | NO: 7327) | TATLTIS | (SEQ ID | (SEQ ID |
| variant_ | C (SEQ | NO: 7326) | (SEQ ID | | GTQAM | NO: 7329) | NO: 6080) |
| VL1 | ID NO: | | NO: 6106) | | DEADYF | | |
| | 7335) | | | | C (SEQ | | |
| | | | | | ID NO: | | |
| | | | | | 7336) | | |
| 15E1 | SSETTQP | SGEKLS | WYQQK | ENDRRP | GIPERFS | QFWDST | FGGGTQ |
| Human- | HSVSVA | DKYVH | PGQDPV | S (SEQ ID | GSNPGN | NSAV | LTVL |
| ized | TAQMAR | (SEQ ID | MVIY | NO: 7327) | TATLTIS | (SEQ ID | (SEQ ID |
| variant_ | ITC (SEQ | NO: 7326) | (SEQ ID | | RIEAGD | NO: 7329) | NO: 6080) |
| VL2 | ID NO: | | NO: 6090) | | EADYFC | | |
| | 6089) | | | | (SEQ ID | | |
| | | | | | NO: 7337) | | |
| 15E1 | QSVTTQ | SGEKLS | WYQQLP | ENDRRP | GVPDRF | QFWDST | FGGGTQ |
| Human- | PPSASGT | DKYVH | GTAPKM | S (SEQ ID | SGSNSG | NSAV | LTVL |
| ized | PGQRVTI | (SEQ ID | LIY (SEQ | NO: 7327) | NSASLAI | (SEQ ID | (SEQ ID |
| variant_ | SC (SEQ | NO: 7326) | ID NO: | | SGLRSE | NO: 7329) | NO: 6080) |
| VL3 | ID NO: | | 6078) | | DEADYF | | |
| | 6081) | | | | C (SEQ | | |
| | | | | | ID NO: | | |
| | | | | | 7338 | | |
| 15E1 | QSVTTQ | SGEKLS | WYQQLP | ENDRRP | GVPDRF | QFWDST | FGGGTQ |
| Human- | PPSVSG | DKYVH | GTAPKM | S (SEQ ID | SGSNSG | NSAV | LTVL |
| ized | APGQRV | (SEQ ID | LIY (SEQ | NO: 7327) | NSASLAI | (SEQ ID | (SEQ ID |
| variant_ | TISC | NO: 7326) | ID NO: | | TGLQAE | NO: 7329) | NO: 6080) |
| VL4 | (SEQ ID | | 6078) | | DEADYF | | |
| | NO: 6077) | | | | C (SEQ | | |
| | | | | | ID NO: | | |
| | | | | | 7339) | | |
| 15E1 | DSVTTQ | SGEKLS | WYQQRP | ENDRRP | GVPDRF | QFWDST | FGGGTK |
| Human- | SPLSLPV | DKYVH | GQSPRM | S (SEQ ID | SGSNSG | NSAV | VEIK |
| ized | TLGQPA | (SEQ ID | LIY (SEQ | NO: 7327) | NDATLK | (SEQ ID | (SEQ ID |
| variant_ | SISC | NO: 7326) | ID NO: | | ISRVEAE | NO: 7329) | NO: 233) |
| VL5 | (SEQ ID | | 7341) | | DVGVYF | | |
| | NO: 7340) | | | | C (SEQ | | |
| | | | | | ID NO: | | |
| | | | | | 7342) | | |

TABLE 8A

| Ab ID | VHFWR1 | VHCDR1 | VHFWR2 | VHCDR2 | VHFWR3 | VHCDR3 | VHFWR4 |
|---|---|---|---|---|---|---|---|
| BKM | EIQLLES | ITTTGYH | WVRQAP | YIYSSGS | RFTISRD | GDWHY | WGQGT |
| 0138 | GGGLVQ | WN (SEQ | GKGLEW | TSYNPSL | TSKNTF | FDY | MVTVSS |
| | PGGSLR | ID NO: | VG (SEQ | KS (SEQ | YLQMNS | (SEQ ID | (SEQ ID |
| | LSCAVS | 375) | ID NO: | ID NO: | LRAEDT | NO: 379) | NO: 380) |
| | GFS (SEQ | | 376) | 377) | AVYYCA | | |
| | ID NO: | | | | R (SEQ | | |
| | 374) | | | | ID NO: | | |
| | | | | | 378) | | |
| BKM | EIQLLES | ITTTGYH | WVRQAP | YIYSSGS | RFTISRD | GDWHY | WGQGT |
| 0139 | GGGLVQ | WN (SEQ | GKGLEW | TSYNPSL | TSKNTF | FDY | MVTVSS |
| | PGGSLR | ID NO: | VG (SEQ | KS (SEQ | YLQMNS | (SEQ ID | (SEQ ID |
| | LSCAVS | 389) | ID NO: | ID NO: | LRAEDT | NO: 393) | NO: 394) |
| | GFS (SEQ | | 390) | 391) | AVYYCA | | |
| | ID NO: | | | | R (SEQ | | |
| | 388) | | | | ID NO: | | |
| | | | | | 392) | | |
| BKM | EIQLLES | ITTIGYH | WVRQAP | YIYSSGS | RFTISRD | GDWHY | WGQGT |
| 0140 | GGGLVQ | WN (SEQ | GKGLEW | TSYNPSL | TSKNTF | FDY | MVTVSS |
| | PGGSLR | ID NO: | VG (SEQ | KS (SEQ | YLQMNS | (SEQ ID | (SEQ ID |
| | LSCAVS | 403) | ID NO: | ID NO: | LRAEDT | NO: 407) | NO: 408) |
| | GFS (SEQ | | 404) | 405) | AVYYCA | | |
| | ID NO: | | | | R (SEQ | | |
| | 402) | | | | ID NO: | | |
| | | | | | 406) | | |
| BKM | EIQLLES | ITTTGYH | WVRQAP | YIYSSGS | RFTISRD | GDWHY | WGQGT |
| 0141 | GGGLVQ | WN (SEQ | GKGLEW | TSYNPSL | TSKNTF | FDY | MVTVSS |
| | PGGSLR | ID NO: | VG (SEQ | KS (SEQ | YLQMNS | (SEQ ID | (SEQ ID |
| | LSCAVS | 417) | ID NO: | ID NO: | LRAEDT | NO: 421) | NO: 422) |
| | GFS (SEQ | | 418) | 419) | AVYYCA | | |
| | ID NO: | | | | R (SEQ | | |
| | 416) | | | | ID NO: | | |
| | | | | | 420) | | |
| BKM | EIQLLES | ITTTGYH | WVRQAP | YIYSSGS | RFTISRD | GDWHY | WGQGT |
| 0142 | GGGLVQ | WN (SEQ | GKGLEW | TSYAPSI | TSKNTF | FDY | MVTVSS |
| | PGGSLR | ID NO: | VG (SEQ | KS (SEQ | YLQMNS | (SEQ ID | (SEQ ID |
| | LSCAVS | 431) | ID NO: | ID NO: | LRAEDT | NO: 435) | NO: 436) |
| | GFS (SEQ | | 432) | 433) | AVYYCA | | |
| | ID NO: | | | | R (SEQ | | |
| | 430) | | | | ID NO: | | |
| | | | | | 434) | | |
| BKM | EIQLLES | ITTTGYH | WVRQAP | YIYSSGS | RFTISRD | GDWHY | WGQGT |
| 0143 | GGGLVQ | WN (SEQ | GKGLEW | TSYAPSL | TSKNTF | FDY | MVTVSS |
| | PGGSLR | ID NO: | VG (SEQ | KS (SEQ | YLQMNS | (SEQ ID | (SEQ ID |
| | LSCAVS | 445) | ID NO: | ID NO: | LRAEDT | NO: 449) | NO: 450) |
| | GFS (SEQ | | 446) | 447) | AVYYCA | | |
| | ID NO: | | | | R (SEQ | | |
| | 444) | | | | ID NO: | | |
| | | | | | 448) | | |
| BKM | EIQLLES | ITTTGYH | WVRQAP | YTYSSGS | RFTISRD | GDWHY | WGQGT |
| 0144 | GGGLVQ | WN (SEQ | GKGLEW | TSYAPSL | TSKNTF | FDY | MVTVSS |
| | PGGSLR | ID NO: | VG (SEQ | KS (SEQ | YLQMNS | (SEQ ID | (SEQ ID |
| | LSCAVS | 459) | ID NO: | ID NO: | LRAEDT | NO: 463) | NO: 464) |
| | GFS (SEQ | | 460) | 461) | AVYYCA | | |
| | ID NO: | | | | R (SEQ | | |
| | 458) | | | | ID NO: | | |
| | | | | | 462) | | |
| BKM | EIQLLES | ITTTGYH | WVRQAP | YIYSSGS | RFTISRD | GDWHY | WGQGT |
| 0145 | GGGLVQ | WN (SEQ | GKGLEW | TSYAPSL | TSKNTF | FDY | MVTVSS |
| | PGGSLR | ID NO: | VG (SEQ | KS (SEQ | YLQMNS | (SEQ ID | (SEQ ID |
| | LSCAVS | 472) | ID NO: | ID NO: | LRAEDT | NO: 476) | NO: 477) |
| | GFS (SEQ | | 473) | 474) | AVYYCA | | |
| | ID NO: | | | | R (SEQ | | |
| | 471) | | | | ID NO: | | |
| | | | | | 475) | | |

TABLE 8B
Exemplary light chain CDRs and FWRs of NKp30-targeting antigen binding domains

| Ab ID | VLFWR1 | VLCDR1 | VLFWR2 | VLCDR2 | VLFWR3 | VLCDR3 | VLFWR4 |
|---|---|---|---|---|---|---|---|
| BKM | DSVTTQ | SGEKLS | WYQQRP | ENDRRP | GVPDRF | QFWDST | FGGGTK |
| 0138 | SPLSLPV | DKYVH | GQSPRM | S (SEQ ID | SGSNSG | ASAV | VEIK |
| | TLGQPA | SEQ ID | LIY (SEQ | NO: 384) | NDATLKI | (SEQ ID | (SEQ ID |
| | SISC | NO: 382) | ID NO: | | SRVEAE | NO: 386) | NO: 387) |
| | (SEQ ID | | 383) | | DVGVYF | | |
| | NO: 381) | | | | C (SEQ ID | | |
| | | | | | NO: 385) | | |
| BKM | DSVTTQ | SGEKLS | WYQQRP | ENDRRP | GVPDRF | QFWAST | FGGGTK |
| 0139 | SPLSLPV | DKYVH | GQSPRM | S (SEQ ID | SGSNSG | NSAV | VEIK |
| | TLGQPA | (SEQ ID | LIY (SEQ | NO: 398) | NDATLKI | (SEQ ID | (SEQ ID |
| | SISC | NO: 396) | ID NO: | | SRVEAE | NO: 400) | NO: 401) |
| | (SEQ ID | | 397) | | DVGVYF | | |
| | NO: 395) | | | | C (SEQ ID | | |
| | | | | | NO: 399) | | |
| BKM | SSETTQP | SGEKLS | WYQQKP | ENDRRP | GIPERFS | QFWAST | FGGGTQ |
| 0140 | PSVSVSP | DKYVH | GQSPVM | S (SEQ ID | GSNSGN | NSAV | LTVL |
| | GQTASIT | (SEQ ID | VIY (SEQ | NO: 412) | TATLTIS | (SEQ ID | (SEQ ID |
| | C (SEQ ID | NO: 410) | ID NO: | | GTQAMD | NO: 414) | NO: 415) |
| | NO: 409) | | 411) | | EADYFC | | |
| | | | | | (SEQ ID | | |
| | | | | | NO: 413) | | |
| BKM | SSETTQP | SGEKLS | WYQQKP | ENDRRP | GIPERFS | QFWDST | FGGGTQ |
| 0141 | PSVSVSP | DKYVH | GQSPVM | S (SEQ ID | GSNSGN | ASAV | LTVL |
| | GQTASIT | (SEQ ID | VIY (SEQ | NO: 426) | TATLIIS | (SEQ ID | (SEQ ID |
| | C (SEQ ID | NO: 424) | ID NO: | | GTQAMD | NO: 428) | NO: 429) |
| | NO: 423) | | 425) | | EADYFC | | |
| | | | | | (SEQ ID | | |
| | | | | | NO: 427) | | |
| BKM | DSVTTQ | SGEKLS | WYQQRP | ENDRRP | GVPDRF | QFWDST | FGGGTK |
| 0142 | SPLSLPV | DKYVH | GQSPRM | S (SEQ ID | SGSNSG | NSAV | VEIK |
| | TLGQPA | (SEQ ID | LIY (SEQ | NO: 440) | NDATLKI | (SEQ ID | (SEQ ID |
| | SISC | NO: 438) | ID NO: | | SRVEAE | NO: 442) | NO: 443) |
| | (SEQ ID | | 439) | | DVGVYF | | |
| | NO: 437) | | | | C (SEQ ID | | |
| | | | | | NO: 441) | | |
| BKM | SSETTQP | SGEKLS | WYQQKP | ENDRRP | GIPERFS | QFWDST | FGGGTQ |
| 0143 | PSVSVSP | DKYVH | GQSPVM | S (SEQ ID | GSNSGN | NSAV | LTVL |
| | GQTASIT | (SEQ ID | VIY (SEQ | NO: 454) | TATLIIS | (SEQ ID | (SEQ ID |
| | C (SEQ ID | 452) | ID NO: | | GTQAMD | NO: 456) | NO: 457) |
| | NO: 451) | | 453) | | EADYFC | | |
| | | | | | (SEQ ID | | |
| | | | | | NO: 455) | | |
| BKM | DSVTTQ | SGEKLS | WYQQRP | ENDRRP | GVPDRF | QFWAST | FGGGTK |
| 0144 | SPLSLPV | DKYVH | GQSPRM | S (SEQ ID | SGSNSG | ASAV | VEIK |
| | TLGQPA | (SEQ ID | LIY (SEQ | NO: 468) | NDATLKI | (SEQ ID | (SEQ ID |
| | SISC | NO: 466) | ID NO: | | SRVEAE | NO: 469) | NO: 470) |
| | (SEQ ID | | 467) | | DVGVYF | | |
| | NO: 465) | | | | C (SEQ ID | | |
| | | | | | NO: 441) | | |
| BKM | SSETTQP | SGEKLS | WYQQKP | ENDRRP | GIPERFS | QFWAST | FGGGTQ |
| 0145 | PSVSVSP | DKYVH | GQSPVM | S (SEQ ID | GSNSGN | ASAV | LTVL |
| | GQTASIT | (SEQ ID | VIY (SEQ | NO: 481) | TATLTIS | (SEQ ID | (SEQ ID |
| | C (SEQ ID | NO: 479) | ID NO: | | GTQAMD | NO: 483) | NO: 484) |
| | NO: 478) | | 480) | | EADYFC | | |
| | | | | | (SEQ ID | | |
| | | | | | NO: 482) | | |

TABLE 9
Exemplary variable regions of NKp30-targeting antigen binding domains

| SEQ | | | |
|---|---|---|---|
| ID NO | Ab ID | Description | Sequence |
| SEQ | 9G1-HC | 9G1 heavy chain | QIQLQESGPGLVKPSQSLSLTCSVTGFSINTGGY |
| ID NO: | | variable region | HWNWIRQFPGKKLEWMGYIYSSGSTSYNPSLKS |
| 6121 | | | RISITRDTSKNQFFLQLNSVTTEDTATYYCARGN |
| | | | WHYFDFWGQGTMVTVSS |
| SEQ | 15H6-HC | 15H6 heavy | QIQLQESGPGLVKPSQSLSLTCSVTGFSINTGGY |
| ID NO: | | chain variable | HWNWIRQFPGKKLEWMGYIYSSGTTRYNPSLK |
| 6122 | | region | SRISITRDTSKNQFFLQLNSVTPEDTATYYCTRG |
| | | | NWHYFDYWGQGTLVAVSS |
| SEQ | 9G1-HC_1 | 9G1 heavy chain | QIQLQESGPGLVKPSETLSLTCTVSGFSINTGGYH |
| ID NO: | | variable region | WNWIRQPAGKGLEWIGYIYSSGSTSYNPSLKSR |
| 6123 | | humanized | VTMSRDTSKNQFSLKLSSVTAADTAVYYCARG |
| | | variant 1 | NWHYFDFWGQGTMVTVSS |
| SEQ | 9G1-HC_2 | 9G1 heavy chain | QIQLQESGPGLVKPSQTLSLTCTVSGFSINTGGY |
| ID NO: | | variable region | HWNWIRQHPGKGLEWIGYIYSSGSTSYNPSLKS |
| 6124 | | humanized | LVTISRDTSKNQFSLKLSSVTAADTAVYYCARG |
| | | variant 2 | NWHYFDFWGQGTMVTVSS |
| SEQ | 9G1-HC_3 | 9G1 heavy chain | EIQLLESGGGLVQPGGSLRLSCAVSGFSINTGGY |
| ID NO: | | variable region | HWNWVRQAPGKGLEWVGYIYSSGSTSYNPSLK |
| 6125 | | humanized | SRFTISRDTSKNTFYLQMNSLRAEDTAVYYCAR |
| | | variant 3 | GNWHYFDFWGQGTMVTVSS |
| SEQ | 9G1-HC_4 | 9G1 heavy chain | QIQLVQSGAEVKKPGSSVKVSCKVSGFSINTGG |
| ID NO: | | variable region | YHWNWVRQAPGQGLEWMGYIYSSGSTSYNPSL |
| 6126 | | humanized | KSRVTITRDTSTNTFYMELSSLRSEDTAVYYCAR |
| | | variant 4 | GNWHYFDFWGQGTMVTVSS |
| SEQ | 9G1-HC_5 | 9G1 heavy chain | EIQLVESGGGLVQPGGSLRLSCAVSGFSINTGGY |
| ID NO: | | variable region | HWNWVRQAPGKGLEWVGYIYSSGSTSYNPSLK |
| 6127 | | humanized | SRFTISRDTAKNSFYLQMNSLRAEDTAVYYCAR |
| | | variant 5 | GNWHYFDFWGQGTMVTVSS |
| SEQ | 9G1-HC_6 | 9G1 heavy chain | QIQLVQSGAEVKKPGASVKVSCKVSGFSINTGG |
| ID NO: | | variable region | YHWNWVRQAPGQGLEWMGYIYSSGSTSYNPSL |
| 6128 | | humanized | KSRVTMTRDTSTNTFYMELSSLRSEDTAVYYCA |
| | | variant 6 | RGNWHYFDFWGQGTMVTVSS |
| SEQ | 15H6- | 15H6 heavy | QIQLQESGPGLVKPSQTLSLTCTVSGFSINTGGY |
| ID NO: | HC_1 | chain variable | HWNWIRQHPGKGLEWIGYIYSSGTTRYNPSLKS |
| 6129 | | region humanized | LVTISRDTSKNQFSLKLSSVTAADTAVYYCARG |
| | | variant 1 | NWHYFDYWGQGTLVTVSS |
| SEQ | 15H6- | 15H6 heavy | QIQLQESGPGLVKPSETLSLTCTVSGFSINTGGYH |
| ID NO: | HC_2 | chain variable | WNWIRQPAGKGLEWIGYIYSSGTTRYNPSLKSR |
| 6130 | | region humanized | VTMSRDTSKNQFSLKLSSVTAADTAVYYCARG |
| | | variant 2 | NWHYFDYWGQGTLVTVSS |
| SEQ | 15H6- | 15H6 heavy | EIQLLESGGGLVQPGGSLRLSCAVSGFSINTGGY |
| ID NO: | HC_3 | chain variable | HWNWVRQAPGKGLEWVGYIYSSGTTRYNPSLK |
| 6131 | | region humanized | SRFTISRDTSKNTFYLQMNSLRAEDTAVYYCAR |
| | | variant 3 | GNWHYFDYWGQGTLVTVSS |
| SEQ | 15H6- | 15H6 heavy | QIQLVESGGGLVKPGGSLRLSCAVSGFSINTGGY |
| ID NO: | HC_4 | chain variable | HWNWIRQAPGKGLEWVGYIYSSGTTRYNPSLK |
| 6132 | | region humanized | SRFTISRDTAKNSFYLQMNSLRAEDTAVYYCAR |
| | | variant 4 | GNWHYFDYWGQGTLVTVSS |
| SEQ | 15H6- | 15H6 heavy | QIQLVQSGAEVKKPGASVKVSCKVSGFSINTGG |
| ID NO: | HC_5 | chain variable | YHWNWVRQAPGQGLEWMGYIYSSGTTRYNPS |
| 6133 | | region humanized | LKSRVTMTRDTSTNTFYMELSSLRSEDTAVYYC |
| | | variant 5 | ARGNWHYFDYWGQGTLVTVSS |
| SEQ | 15H6- | 15H6 heavy | EIQLVQSGAEVKKPGATVKISCKVSGFSINTGGY |
| ID NO: | HC_6 | chain variable | HWNWVQQAPGKGLEWMGYIYSSGTTRYNPSL |
| 6134 | | region humanized | KSRVTITRDTSTNTFYMELSSLRSEDTAVYYCAR |
| | | variant 6 | GNWHYFDYWGQGTLVTVSS |
| SEQ | 9G1-LC | 9G1 light chain | SYTLTQPPLLSVALGHKATITCSGERLSDKYVH |
| ID NO: | | variable region | WYQQKPGRAPVMVIYENDKRPSGIPDQFSGSNS |
| 7294 | | | GNIATLTISKAQAGYEADYYCQSWDSTNSAVFG |
| | | | SGTQLTVL |
| SEQ | 15H6-LC | 15H6 light chain | SYTLTQPPSLSVAPGQKATIICSGENLSDKYVHW |
| ID NO: | | variable region | YQQKPGRAPVMVIYENEKRPSGIPDQFSGSNSG |
| 6136 | | | NIATLTISKAQPGSEADYYCHYWESINSVVFGSG |
| | | | THLTVL |
| SEQ | 9G1-LC_1 | 9G1 light chain | QSVTTQPPSVSGAPGQRVTISCSGERLSDKYVH |
| ID NO: | | variable region | WYQQLPGTAPKMLIYENDKRPSGVPDRFSGSNS |
| 6137 | | humanized | GNSASLAITGLQAEDEADYYCQSWDSTNSAVFG |
| | | variant 1 | GGTQLTVL |
| SEQ | 9G1-LC_2 | 9G1 light chain | QSVTTQPPSASGTPGQRVTISCSGERLSDKYVH |
| ID NO: | | variable region | WYQQLPGTAPKMLIYENDKRPSGVPDRFSGSNS |
| 6138 | | humanized | GNSASLAISGLQSEDEADYYCQSWDSTNSAVFG |
| | | variant 2 | GGTQLTVL |
| SEQ | 9G1-LC_3 | 9G1 light chain | QSVTTQPPSASGTPGQRVTISCSGERLSDKYVH |
| ID NO: | | variable region | WYQQLPGTAPKMLIYENDKRPSGVPDRFSGSNS |
| 6139 | | humanized | GNSASLAISGLRSEDEADYYCQSWDSTNSAVFG |
| | | variant 3 | GGTQLTVL |
| SEQ | 9G1-LC_4 | 9G1 light chain | SSETTQPHSVSVATAQMARITCSGERLSDKYVH |
| ID NO: | | variable region | WYQQKPGQDPVMVIYENDKRPSGIPERFSGSNP |
| 6140 | | humanized | GNTATLTISRIEAGDEADYYCQSWDSTNSAVFG |
| | | variant 4 | GGTQLTVL |
| SEQ | 9G1-LC_5 | 9G1 light chain | DIQMTQSPSTLSASVGDRVTITCSGERLSDKYVH |
| ID NO: | | variable region | WYQQKPGKAPKMLIYENDKRPSGVPSRFSGSNS |
| 6141 | | humanized | GNEATLTISSLQPDDFATYYCQSWDSTNSAVFG |
| | | variant 5 | QGTKVEIK |
| SEQ | 15H6- | 15H6 light chain | QYVLTQPPSASGTPGQRVTISCSGENLSDKYVH |
| ID NO: | LC 1 | variable region | WYQQLPGTAPKMLIYENEKRPSGVPDRFSGSNS |
| 6142 | | humanized | GNSASLAISGLQSEDEADYYCHYWESINSVVFG |
| | | variant 1 | EGTELTVL |
| SEQ | 15H6- | 15H6 light chain | QYVLTQPPSASGTPGQRVTISCSGENLSDKYVH |
| ID NO: | LC_2 | variable region | WYQQLPGTAPKMLIYENEKRPSGVPDRFSGSNS |
| 6143 | | humanized | GNSASLAISGLRSEDEADYYCHYWESINSVVFG |
| | | variant 2 | EGTELTVL |
| SEQ | 15H6- | 15H6 light chain | SYELTQPPSVSVSPGQTASITCSGENLSDKYVHW |
| ID NO: | LC_3 | variable region | YQQKPGQSPVMVIYENEKRPSGIPERFSGSNSGN |
| 6144 | | humanized | TATLTISGTQAMDEADYYCHYWESINSVVFGEG |
| | | variant 3 | TELTVL |
| SEQ | 15H6- | 15H6 light chain | DYVLTQSPLSLPVTPGEPASISCSGENLSDKYVH |
| ID NO: | LC_4 | variable region | WYLQKPGQSPQMLIYENEKRPSGVPDRFSGSNS |
| 6145 | | humanized | GNDATLKISRVEAEDVGVYYCHYWESINSVVFG |
| | | variant 4 | QGTKVEIK |
| SEQ | 15H6- | 15H6 light chain | AYQLTQSPSSLSASVGDRVTITCSGENLSDKYVH |
| ID NO: | LC_5 | variable region | WYQQKPGKAPKMLIYENEKRPSGVPSRFSGSNS |
| 6146 | | humanized | GNDATLTISSLQPEDFATYYCHYWESINSVVFGQ |
| | | variant 5 | GTKVEIK |
| SEQ | 15H6- | 15H6 light chain | EYVLTQSPATLSVSPGERATLSCSGENLSDKYVH |
| ID NO: | LC_6 | variable region | WYQQKPGQAPRMLIYENEKRPSGIPARFSGSNS |
| 6147 | | humanized | GNEATLTISSLQSEDFAVYYCHYWESINSVVFGQ |
| | | variant 6 | GTKVEIK |
| SEQ | 9D9-HC | 9D9 heavy chain | QIQLQESGPGLVKPSQSLSLSCSVTGFSINTGGYH |
| ID NO: | | variable region | WNWIRQFPGKKVEWMGYIYSSGTTKYNPSLKS |
| 7295 | | | RISITRDTSKNQFFLQLNSVTTEDTATYYCARGD |
| | | | WHYFDYWGQGTMVAVSS |
| SEQ | 9D9-LC | 9D9 light chain | SYTLTQPPLVSVALGQKATIICSGENLSDKYVH |
| ID NO: | | variable region | WYQQKPGRAPVMVIYENDKRPSGIPDQFSGSNS |
| 7296 | | | GNIATLTISKAQAGYEADYYCHCWDSTNSAVFG |
| | | | SGTHLTVL |
| SEQ | 3A12-HC | 3A12 heavy | QIQLQESGPGLVKPSQSLSLTCSVTGFSINTGGY |
| ID NO: | | chain variable | HWNWIRQFPGKKLEWMGYIYSSGSTRYNPSLKS |
| 7297 | | region | RFSITRDTSKNQFFLQLNSVTTEDTATYYCTRGN |
| | | | WHYFDYWGQGTLVAVSS |
| SEQ | 3A12-LC | 3A12 light chain | SYTLTQPPLVSVALGQKATIICSGENLSDKYVH |
| ID NO: | | variable region | WYQQKPGRAPVMVIYENDKRPSGIPDQFSGSNS |
| 7296 | | | GNIATLTISKAQAGYEADYYCHCWDSTNSAVFG |
| | | | SGTHLTVL |
| SEQ | 12D10-HC | 12D10 heavy | QIQLQESGPGLVKPSQSLSLTCSVTGFSINTGGY |
| ID NO: | | chain variable | HWNWIRQFPGKKLEWMGYIYSSGTTRYNPSLK |
| 6122 | | region | SRISITRDTSKNQFFLQLNSVTPEDTATYYCTRG |
| | | | NWHYFDYWGQGTLVAVSS |
| SEQ | 12D10-LC | 12D10 light | SYTLTQPPSLSVAPGQKATIICSGENLSDKYVHW |
| ID NO: | | chain variable | YQQKPGRAPVMVIYENEKRPSGIPDQFSGSNSG |
| 6136 | | region | NIATLTISKAQPGSEADYYCHYWESINSVVFGSG |
| | | | THLTVL |
| SEQ | 15E1-HC | 15E1 heavy chain | QIQLQESGPGLVKPSQSLSLSCSVTGFSITTTGYH |
| ID NO: | | variable region | WNWIRQFPGKKLEWMGYIYSSGSTSYNPSLKSR |
| 7298 | | | FSITRDTSKNQFFLQLNSVTTEDTATYYCARGD |
| | | | WHYFDYWGPGTMVTVSS |
| SEQ | 15E1-LC | 15E1 light chain | SFTLTQPPLVSVAVGQVATITCSGEKLSDKYVH |
| ID NO: | | variable region | WYQQKPGRAPVMVIYENDRRPSGIPDQFSGSNS |
| 7299 | | | GNIASLTISKAQAGDEADYFCQFWDSTNSAVFG |
| | | | GGTQLTVL |
| SEQ | 15E1 | 15E1 heavy chain | QIQLQESGPGLVKPSQTLSLTCTVSGFSITTTGYH |
| ID NO: | Humanized | variable region | WNWIRQHPGKGLEWIGYIYSSGSTSYNPSLKSL |
| 7300 | variant_VH | humanized | VTISRDTSKNQFSLKLSSVTAADTAVYYCARGD |
| | 1 | variant 1 | WHYFDYWGQGTMVTVSS |
| SEQ | 15E1 | 15E1 heavy chain | QIQLVESGGGLVKPGGSLRLSCAVSGFSITTTGY |
| ID NO: | Humanized | variable region | HWNWIRQAPGKGLEWVGYIYSSGSTSYNPSLKS |
| 7301 | variant_VH | humanized | RFTISRDTAKNSFYLQMNSLRAEDTAVYYCARG |
| | 2 | variant 2 | DWHYFDYWGQGTMVTVSS |
| SEQ | 15E1 | 15E1 heavy chain | EIQLLESGGGLVQPGGSLRLSCAVSGFSITTTGY |
| ID NO: | Humanized | variable region | HWNWVRQAPGKGLEWVGYIYSSGSTSYNPSLK |
| 7302 | variant_VH | humanized | SRFTISRDTSKNTFYLQMNSLRAEDTAVYYCAR |
| | 3 | variant 3 | GDWHYFDYWGQGTMVTVSS |
| | (BJM0407 | | |
| | VH and | | |
| | BJM0411 | | |
| | VH) | | |
| SEQ | 15E1 | 15E1 heavy chain | EIQLVESGGGLVQPGGSLRLSCAVSGFSITTTGY |
| ID NO: | Humanized | variable region | HWNWVRQAPGKGLEWVGYIYSSGSTSYNPSLK |
| 7303 | variant_VH | humanized | SRFTISRDTAKNSFYLQMNSLRAEDTAVYYCAR |
| | 4 | variant 4 | GDWHYFDYWGQGTMVTVSS |
| SEQ | 15E1 | 15E1 heavy chain | QIQLVQSGAEVKKPGASVKVSCKVSGFSITTTGY |
| ID NO: | Humanized | variable region | HWNWVRQAPGQGLEWMGYIYSSGSTSYNPSLK |
| 7304 | variant_VH | humanized | SRVTMTRDTSTNTFYMELSSLRSEDTAVYYCAR |
| | 5 | variant 5 | GDWHYFDYWGQGTMVTVSS |
| SEQ | 15E1 | 15E1 light chain | SSETTQPPSVSVSPGQTASITCSGEKLSDKYVHW |
| ID NO: | Humanized | variable region | YQQKPGQSPVMVIYENDRRPSGIPERFSGSNSGN |
| 7305 | variant_VL | humanized | TATLTISGTQAMDEADYFCQFWDSTNSAVFGGG |
| | 1 | variant 1 | TQLTVL |
| | (BJM0407 | | |
| | VL) | | |
| SEQ | 15E1 | 15E1 light chain | SSETTQPHSVSVATAQMARITCSGEKLSDKYVH |
| ID NO: | Humanized | variable region | WYQQKPGQDPVMVIYENDRRPSGIPERFSGSNP |
| 7306 | variant_VL | humanized | GNTATLTISRIEAGDEADYFCQFWDSTNSAVFG |
| | 2 | variant 2 | GGTQLTVL |
| SEQ | 15E1 | 15E1 light chain | QSVTTQPPSASGTPGQRVTISCSGEKLSDKYVH |
| ID NO: | Humanized | variable region | WYQQLPGTAPKMLIYENDRRPSGVPDRFSGSNS |
| 7307 | variant_VL | humanized | GNSASLAISGLRSEDEADYFCQFWDSTNSAVFG |
| | 3 | variant 3 | GGTQLTVL |
| SEQ | 15E1 | 15E1 light chain | QSVTTQPPSVSGAPGQRVTISCSGEKLSDKYVH |
| ID NO: | Humanized | variable region | WYQQLPGTAPKMLIYENDRRPSGVPDRFSGSNS |
| 7308 | variant_VL | humanized | GNSASLAITGLQAEDEADYFCQFWDSTNSAVFG |
| | 4 | variant 4 | GGTQLTVL |
| SEQ | 15E1 | 15E1 light chain | DSVTTQSPLSLPVTLGQPASISCSGEKLSDKYVH |
| ID NO: | Humanized | variable region | WYQQRPGQSPRMLIYENDRRPSGVPDRFSGSNS |
| 7309 | variant_VL | humanized | GNDATLKISRVEAEDVGVYFCQFWDSTNSAVFG |
| | 5 | variant 5 | GGTKVEIK |
| | BJM0411 | | |
| | VL) | | |
| SEQ | BKM0138 | BKM0138 heavy | EIQLLESGGGLVQPGGSLRLSCAVSGFSITTTGY |
| ID NO: | VH | chain variable | HWNWVRQAPGKGLEWVGYIYSSGSTSYNPSLK |
| 357 | | region | SRFTISRDTSKNTFYLQMNSLRAEDTAVYYCAR |
| | | | GDWHYFDYWGQGTMVTVSS |
| SEQ | BKM0139 | BKM0139 heavy | EIQLLESGGGLVQPGGSLRLSCAVSGFSITTTGY |
| ID NO: | VH | chain variable | HWNWVRQAPGKGLEWVGYIYSSGSTSYNPSLK |
| 358 | | region | SRFTISRDTSKNTFYLQMNSLRAEDTAVYYCAR |
| | | | GDWHYFDYWGQGTMVTVSS |
| SEQ | BKM0140 | BKM0140 heavy | EIQLLESGGGLVQPGGSLRLSCAVSGFSITTTGY |
| ID NO: | VH | chain variable | HWNWVRQAPGKGLEWVGYIYSSGSTSYNPSLK |
| 359 | | region | SRFTISRDTSKNTFYLQMNSLRAEDTAVYYCAR |
| | | | GDWHYFDYWGQGTMVTVSS |
| SEQ | BKM0141 | BKM0141 heavy | EIQLLESGGGLVQPGGSLRLSCAVSGFSITTTGY |
| ID NO: | VH | chain variable | HWNWVRQAPGKGLEWVGYIYSSGSTSYNPSLK |
| 360 | | region | SRFTISRDTSKNTFYLQMNSLRAEDTAVYYCAR |
| | | | GDWHYFDYWGQGTMVTVSS |
| SEQ | BKM0142 | BKM0142 heavy | EIQLLESGGGLVQPGGSLRLSCAVSGFSITTTGY |
| ID NO: | VH | chain variable | HWNWVRQAPGKGLEWVGYIYSSGSTSYAPSLK |
| 361 | | region | SRFTISRDTSKNTFYLQMNSLRAEDTAVYYCAR |
| | | | GDWHYFDYWGQGTMVTVSS |
| SEQ | BKM0143 | BKM0143 heavy | EIQLLESGGGLVQPGGSLRLSCAVSGFSITTTGY |
| ID NO: | VH | chain variable | HWNWVRQAPGKGLEWVGYIYSSGSTSYAPSLK |
| 362 | | region | SRFTISRDTSKNTFYLQMNSLRAEDTAVYYCAR |
| | | | GDWHYFDYWGQGTMVTVSS |
| SEQ | BKM0144 | BKM0144 heavy | EIQLLESGGGLVQPGGSLRLSCAVSGFSITTTGY |
| ID NO: | VH | chain variable | HWNWVRQAPGKGLEWVGYIYSSGSTSYAPSLK |
| 363 | | region | SRFTISRDTSKNTFYLQMNSLRAEDTAVYYCAR |
| | | | GDWHYFDYWGQGTMVTVSS |
| SEQ | BKM0145 | BKM0145 heavy | EIQLLESGGGLVQPGGSLRLSCAVSGFSITTTGY |
| ID NO: | VH | chain variable | HWNWVRQAPGKGLEWVGYIYSSGSTSYAPSLK |
| 364 | | region | SRFTISRDTSKNTFYLQMNSLRAEDTAVYYCAR |
| | | | GDWHYFDYWGQGTMVTVSS |
| SEQ | BKM0138 | BKM0138 light | DSVTTQSPLSLPVTLGQPASISCSGEKLSDKYVH |
| ID NO: | VL | chain variable | WYQQRPGQSPRMLIYENDRRPSGVPDRFSGSNS |
| 365 | | region | GNDATLKISRVEAEDVGVYFCQFWDSTASAVFG |
| | | | GGTKVEIK |
| SEQ | BKM0139 | BKM0139 light | DSVTTQSPLSLPVTLGQPASISCSGEKLSDKYVH |
| ID NO: | VL | chain variable | WYQQRPGQSPRMLIYENDRRPSGVPDRFSGSNS |
| 366 | | region | GNDATLKISRVEAEDVGVYFCQFWASTNSAVFG |
| | | | GGTKVEIK |
| SEQ | BKM0140 | BKM0140 light | SSETTQPPSVSVSPGQTASITCSGEKLSDKYVHW |
| ID NO: | VL | chain variable | YQQKPGQSPVMVIYENDRRPSGIPERFSGSNSGN |
| 367 | | region | TATLTISGTQAMDEADYFCQFWASTNSAVFGGG |
| | | | TQLTVL |
| SEQ | BKM0141 | BKM0141 light | SSETTQPPSVSVSPGQTASITCSGEKLSDKYVHW |
| ID NO: | VL | chain variable | YQQKPGQSPVMVIYENDRRPSGIPERFSGSNSGN |
| 368 | | region | TATLTISGTQAMDEADYFCQFWDSTASAVFGGG |
| | | | TQLTVL |
| SEQ | BKM0142 | BKM0142 light | DSVTTQSPLSLPVTLGQPASISCSGEKLSDKYVH |
| ID NO: | VL | chain variable | WYQQRPGQSPRMLIYENDRRPSGVPDRFSGSNS |
| 369 | | region | GNDATLKISRVEAEDVGVYFCQFWDSTNSAVFG |
| | | | GGTKVEIK |
| SEQ | BKM0143 | BKM0143 light | SSETTQPPSVSVSPGQTASITCSGEKLSDKYVHW |
| ID NO: | VL | chain variable | YQQKPGQSPVMVIYENDRRPSGIPERFSGSNSGN |
| 370 | | region | TATLTISGTQAMDEADYFCQFWDSTNSAVFGGG |
| | | | TQLTVL |
| SEQ | BKM0144 | BKM0144 light | DSVTTQSPLSLPVTLGQPASISCSGEKLSDKYVH |
| ID NO: | VL | chain variable | WYQQRPGQSPRMLIYENDRRPSGVPDRFSGSNS |
| 371 | | region | GNDATLKISRVEAEDVGVYFCQFWASTASAVFG |
| | | | GGTKVEIK |
| SEQ | BKM0145 | BKM0145 light | SSETTQPPSVSVSPGQTASITCSGEKLSDKYVHW |
| ID NO: | VL | chain variable | YQQKPGQSPVMVIYENDRRPSGIPERFSGSNSGN |
| 372 | | region | TATLTISGTQAMDEADYFCQFWASTASAVFGGG |
| | | | TQLTVL |

TABLE 10
Exemplary NKp30-targeting antigen binding domains/antibody molecules

| SEQ | | | |
|---|---|---|---|
| ID NO | Ab ID | Description | Sequence |
| SEQ | Ch (anti- | 9G1 heavy chain | QIQLQESGPGLVKPSQSLSLTCSVTGFSINTGGY |
| ID NO: | NKp30 | | HWNWIRQFPGKKLEWMGYIYSSGSTSYNPSLKS |
| 6148 | 9G1)HC | | RISITRDTSKNQFFLQLNSVTTEDTATYYCARGN |
| | N297A | | WHYFDFWGQGTMVTVSSASTKGPSVFPLAPSSK |
| | | | STSGGTAALGCLVKDYFPEPVTVSWNSGALTSG |
| | | | VHTFPAVLQSSGLYSLSSVVTVPSSSLGTQTYIC |
| | | | NVNHKPSNTKVDKRVEPKSCDKTHTCPPCPAPE |
| | | | LLGGPSVFLFPPKPKDTLMISRTPEVTCVVVDVS |
| | | | HEDPEVKFNWYVDGVEVHNAKTKPREEQYAST |
| | | | YRVVSVLTVLHQDWLNGKEYKCKVSNKALPAP |
| | | | IEKTISKAKGQPREPQVCTLPPSREEMTKNQVSL |
| | | | SCAVKGFYPSDIAVEWESNGQPENNYKTTPPVL |
| | | | DSDGSFFLVSKLTVDKSRWQQGNVFSCSVMHE |
| | | | ALHNHYTQKSLSLSPGK |
| SEQ | Ch (anti- | 9G1 heavy chain | QIQLQESGPGLVKPSQSLSLTCSVTGFSINTGGY |
| ID NO: | NKp30 | | HWNWIRQFPGKKLEWMGYIYSSGSTSYNPSLKS |
| 6149 | 9G1)HC | | RISITRDTSKNQFFLQLNSVTTEDTATYYCARGN |
| | | | WHYFDFWGQGTMVTVSSASTKGPSVFPLAPSSK |
| | | | STSGGTAALGCLVKDYFPEPVTVSWNSGALTSG |
| | | | VHTFPAVLQSSGLYSLSSVVTVPSSSLGTQTYIC |
| | | | NVNHKPSNTKVDKRVEPKSCDKTHTCPPCPAPE |
| | | | LLGGPSVFLFPPKPKDTLMISRTPEVTCVVVDVS |
| | | | HEDPEVKFNWYVDGVEVHNAKTKPREEQYNST |
| | | | YRVVSVLTVLHQDWLNGKEYKCKVSNKALPAP |
| | | | IEKTISKAKGQPREPQVCTLPPSREEMTKNQVSL |
| | | | SCAVKGFYPSDIAVEWESNGQPENNYKTTPPVL |
| | | | DSDGSFFLVSKLTVDKSRWQQGNVFSCSVMHE |
| | | | ALHNHYTQKSLSLSPGK |
| SEQ | Ch (anti- | 9G1 light chain | SYTLTQPPLLSVALGHKATITCSGERLSDKYVH |
| ID NO: | NKp30 | | WYQQKPGRAPVMVIYENDKRPSGIPDQFSGSNS |
| 6150 | 9G1)LC | | GNIATLTISKAQAGYEADYYCQSWDSTNSAVFG |
| | | | SGTQLTVLGQPKANPTVTLFPPSSEELQANKATL |
| | | | VCLISDFYPGAVTVAWKADGSPVKAGVETTKPS |
| | | | KQSNNKYAASSYLSLTPEQWKSHRSYSCQVTHE |
| | | | GSTVEKTVAPTECS |
| SEQ | Ch (anti- | 15H6 heavy | QIQLQESGPGLVKPSQSLSLTCSVTGFSINTGGY |
| ID NO: | NKp30 | chain | HWNWIRQFPGKKLEWMGYIYSSGTTRYNPSLK |
| 6151 | 15H6)HC | | SRISITRDTSKNQFFLQLNSVTPEDTATYYCTRG |
| | N297A | | NWHYFDYWGQGTLVAVSSASTKGPSVFPLAPSS |
| | | | KSTSGGTAALGCLVKDYFPEPVTVSWNSGALTS |
| | | | GVHTFPAVLQSSGLYSLSSVVTVPSSSLGTQTYI |
| | | | CNVNHKPSNTKVDKRVEPKSCDKTHTCPPCPAP |
| | | | ELLGGPSVFLFPPKPKDTLMISRTPEVTCVVVDV |
| | | | SHEDPEVKFNWYVDGVEVHNAKTKPREEQYAS |
| | | | TYRVVSVLTVLHQDWLNGKEYKCKVSNKALPA |
| | | | PIEKTISKAKGQPREPQVCTLPPSREEMTKNQVS |
| | | | LSCAVKGFYPSDIAVEWESNGQPENNYKTTPPV |
| | | | LDSDGSFFLVSKLTVDKSRWQQGNVFSCSVMH |
| | | | EALHNHYTQKSLSLSPGK |
| SEQ | Ch (anti- | 15H6 heavy | QIQLQESGPGLVKPSQSLSLTCSVTGFSINTGGY |
| ID NO: | NKp30 | chain | HWNWIRQFPGKKLEWMGYIYSSGTTRYNPSLK |
| 6152 | 15H6)HC | | SRISITRDTSKNQFFLQLNSVTPEDTATYYCTRG |
| | (hole) | | NWHYFDYWGQGTLVAVSSASTKGPSVFPLAPSS |
| | | | KSTSGGTAALGCLVKDYFPEPVTVSWNSGALTS |
| | | | GVHTFPAVLQSSGLYSLSSVVTVPSSSLGTQTYI |
| | | | CNVNHKPSNTKVDKRVEPKSCDKTHTCPPCPAP |
| | | | ELLGGPSVFLFPPKPKDTLMISRTPEVTCVVVDV |
| | | | SHEDPEVKFNWYVDGVEVHNAKTKPREEQYNS |
| | | | TYRVVSVLTVLHQDWLNGKEYKCKVSNKALPA |
| | | | PIEKTISKAKGQPREPQVCTLPPSREEMTKNQVS |
| | | | LSCAVKGFYPSDIAVEWESNGQPENNYKTTPPV |
| | | | LDSDGSFFLVSKLTVDKSRWQQGNVFSCSVMH |
| | | | EALHNHYTQKSLSLSPGK |
| SEQ | Ch (anti- | 15H6 light chain | SYTLTQPPSLSVAPGQKATIICSGENLSDKYVHW |
| ID NO: | NKp30 | | YQQKPGRAPVMVIYENEKRPSGIPDQFSGSNSG |
| 6153 | 15H6)LC | | NIATLTISKAQPGSEADYYCHYWESINSVVFGSG |
| | | | THLTVLGQPKANPTVTLFPPSSEELQANKATLVC |
| | | | LISDFYPGAVTVAWKADGSPVKAGVETTKPSKQ |
| | | | SNNKYAASSYLSLTPEQWKSHRSYSCQVTHEGS |
| | | | TVEKTVAPTECS |
| SEQ | anti- | Hamster anti- | QIQLQESGPGLVKPSQSLSLTCSVTGFSINTGGY |
| ID NO: | NKp30 | NKp30 scFv of | HWNWIRQFPGKKLEWMGYIYSSGSTSYNPSLKS |
| 6187 | 9G1 scFv | 9G1 in VH to VL | RISITRDTSKNQFFLQLNSVTTEDTATYYCARGN |
| | (VH-VL) | orientation | WHYFDFWGQGTMVTVSSGGGGSGGGGSGGGG |
| | | | SGGGGSSYTLTQPPLLSVALGHKATITCSGERLS |
| | | | DKYVHWYQQKPGRAPVMVIYENDKRPSGIPDQ |
| | | | FSGSNSGNIATLTISKAQAGYEADYYCQSWDST |
| | | | NSAVFGSGTQLTVL |
| SEQ | anti- | Hamster anti- | SYTLTQPPLLSVALGHKATITCSGERLSDKYVH |
| ID NO: | NKp30 | NKp30 scFv of | WYQQKPGRAPVMVIYENDKRPSGIPDQFSGSNS |
| 6188 | 9G1 scFv | 9G1 in VL to VH | GNIATLTISKAQAGYEADYYCQSWDSTNSAVFG |
| | (VL-VH) | orientation | SGTQLTVLGGGGSGGGGSGGGGSGGGGSQIQL |
| | | | QESGPGLVKPSQSLSLTCSVTGFSINTGGYHWN |
| | | | WIRQFPGKKLEWMGYIYSSGSTSYNPSLKSRISIT |
| | | | RDTSKNQFFLQLNSVTTEDTATYYCARGNWHY |
| | | | FDFWGQGTMVTVSS |
| SEQ | anti- | Hamster anti- | QIQLQESGPGLVKPSQSLSLTCSVTGFSINTGGY |
| ID NO: | NKp30 | NKp30 scFv of | HWNWIRQFPGKKLEWMGYIYSSGTTRYNPSLK |
| 6189 | 15H6 scFv | 15H6 in VH to | SRISITRDTSKNQFFLQLNSVTPEDTATYYCTRG |
| | (VH-VL) | VL orientation | NWHYFDYWGQGTLVAVSSGGGGSGGGGSGGG |
| | | | GSGGGGSSYTLTQPPSLSVAPGQKATIICSGENLS |
| | | | DKYVHWYQQKPGRAPVMVIYENEKRPSGIPDQ |
| | | | FSGSNSGNIATLTISKAQPGSEADYYCHYWESIN |
| | | | SVVFGSGTHLTVL |
| SEQ | anti- | Hamster anti- | SYTLTQPPSLSVAPGQKATIICSGENLSDKYVHW |
| ID NO: | NKp30 | NKp30 scFv of | YQQKPGRAPVMVIYENEKRPSGIPDQFSGSNSG |
| 6190 | 15H6 scFv | 15H6 in VL to | NIATLTISKAQPGSEADYYCHYWESINSVVFGSG |
| | (VL-VH) | VH orientation | THLTVLGGGGSGGGGSGGGGSGGGGSQIQLQES |
| | | | GPGLVKPSQSLSLTCSVTGFSINTGGYHWNWIR |
| | | | QFPGKKLEWMGYIYSSGTTRYNPSLKSRISITRD |
| | | | TSKNQFFLQLNSVTPEDTATYYCTRGNWHYFD |
| | | | YWGQGTLVAVSS |
| SEQ | BJM0859 | | EIQLLESGGGLVQPGGSLRLSCAVSGFSITTTGY |
| ID NO: | lambda | | HWNWVRQAPGKGLEWVGYIYSSGSTSYNPSLK |
| 7310 | scFv | | SRFTISRDTSKNTFYLQMNSLRAEDTAVYYCAR |
| | | | GDWHYFDYWGQGTMVTVSSGGGGSGGGGSGG |
| | | | GGSGGGGSSSETTQPPSVSVSPGQTASITCSGEK |
| | | | LSDKYVHWYQQKPGQSPVMVIYENDRRPSGIPE |
| | | | RFSGSNSGNTATLTISGTQAMDEADYFCQFWDS |
| | | | TNSAVFGGGTQLTVL |
| SEQ | BJM0860 | | EIQLLESGGGLVQPGGSLRLSCAVSGFSITTTGY |
| ID NO: | kappa scFv | | HWNWVRQAPGKGLEWVGYIYSSGSTSYNPSLK |
| 7311 | | | SRFTISRDTSKNTFYLQMNSLRAEDTAVYYCAR |
| | | | GDWHYFDYWGQGTMVTVSSGGGGSGGGGSGG |
| | | | GGSGGGGSDSVTTQSPLSLPVTLGQPASISCSGE |
| | | | KLSDKYVHWYQQRPGQSPRMLIYENDRRPSGV |
| | | | PDRFSGSNSGNDATLKISRVEAEDVGVYFCQFW |
| | | | DSTNSAVFGGGTKVEIK |
| SEQ | BKM0138 | | EIQLLESGGGLVQPGGSLRLSCAVSGFSITTTGY |
| ID NO: | scFv | | HWNWVRQAPGKGLEWVGYIYSSGSTSYNPSLK |
| 373 | | | SRFTISRDTSKNTFYLQMNSLRAEDTAVYYCAR |
| | | | GDWHYFDYWGQGTMVTVSSGGGGSGGGGSGG |
| | | | GGSGGGGSDSVTTQSPLSLPVTLGQPASISCSGE |
| | | | KLSDKYVHWYQQRPGQSPRMLIYENDRRPSGV |
| | | | PDRFSGSNSGNDATLKISRVEAEDVGVYFCQFW |
| | | | DSTASAVFGGGTKVEIK |
| SEQ | BKM0139 | | EIQLLESGGGLVQPGGSLRLSCAVSGFSITTTGY |
| ID NO: | scFv | | HWNWVRQAPGKGLEWVGYIYSSGSTSYNPSLK |
| 485 | | | SRFTISRDTSKNTFYLQMNSLRAEDTAVYYCAR |
| | | | GDWHYFDYWGQGTMVTVSSGGGGSGGGGSGG |
| | | | GGSGGGGSDSVTTQSPLSLPVTLGQPASISCSGE |
| | | | KLSDKYVHWYQQRPGQSPRMLIYENDRRPSGV |
| | | | PDRFSGSNSGNDATLKISRVEAEDVGVYFCQFW |
| | | | ASTNSAVFGGGTKVEIK |
| SEQ | BKM0140 | | EIQLLESGGGLVQPGGSLRLSCAVSGFSITTTGY |
| ID NO: | scFv | | HWNWVRQAPGKGLEWVGYIYSSGSTSYNPSLK |
| 486 | | | SRFTISRDTSKNTFYLQMNSLRAEDTAVYYCAR |
| | | | GDWHYFDYWGQGTMVTVSSGGGGSGGGGSGG |
| | | | GGSGGGGSSSETTQPPSVSVSPGQTASITCSGEK |
| | | | LSDKYVHWYQQKPGQSPVMVIYENDRRPSGIPE |
| | | | RFSGSNSGNTATLTISGTQAMDEADYFCQFWAS |
| | | | TNSAVFGGGTQLTVL |
| SEQ | BKM0141 | | EIQLLESGGGLVQPGGSLRLSCAVSGFSITTTGY |
| ID NO: | scFv | | HWNWVRQAPGKGLEWVGYIYSSGSTSYNPSLK |
| 487 | | | SRFTISRDTSKNTFYLQMNSLRAEDTAVYYCAR |
| | | | GDWHYFDYWGQGTMVTVSSGGGGSGGGGSGG |
| | | | GGSGGGGSSSETTQPPSVSVSPGQTASITCSGEK |
| | | | LSDKYVHWYQQKPGQSPVMVIYENDRRPSGIPE |
| | | | RFSGSNSGNTATLTISGTQAMDEADYFCQFWDS |
| | | | TASAVFGGGTQLTVL |
| SEQ | BKM0142 | | EIQLLESGGGLVQPGGSLRLSCAVSGFSITTTGY |
| ID NO: | scFv | | HWNWVRQAPGKGLEWVGYIYSSGSTSYAPSLK |
| 488 | | | SRFTISRDTSKNTFYLQMNSLRAEDTAVYYCAR |
| | | | GDWHYFDYWGQGTMVTVSSGGGGSGGGGSGG |
| | | | GGSGGGGSDSVTTQSPLSLPVTLGQPASISCSGE |
| | | | KLSDKYVHWYQQRPGQSPRMLIYENDRRPSGV |
| | | | PDRFSGSNSGNDATLKISRVEAEDVGVYFCQFW |
| | | | DSTNSAVFGGGTKVEIK |
| SEQ | BKM0143 | | EIQLLESGGGLVQPGGSLRLSCAVSGFSITTTGY |
| ID NO: | scFv | | HWNWVRQAPGKGLEWVGYIYSSGSTSYAPSLK |
| 489 | | | SRFTISRDTSKNTFYLQMNSLRAEDTAVYYCAR |
| | | | GDWHYFDYWGQGTMVTVSSGGGGSGGGGSGG |
| | | | GGSGGGGSSSETTQPPSVSVSPGQTASITCSGEK |
| | | | LSDKYVHWYQQKPGQSPVMVIYENDRRPSGIPE |
| | | | RFSGSNSGNTATLTISGTQAMDEADYFCQFWDS |
| | | | TNSAVFGGGTQLTVL |
| SEQ | BKM0144 | | EIQLLESGGGLVQPGGSLRLSCAVSGFSITTTGY |
| ID NO: | scFv | | HWNWVRQAPGKGLEWVGYIYSSGSTSYAPSLK |
| 490 | | | SRFTISRDTSKNTFYLQMNSLRAEDTAVYYCAR |
| | | | GDWHYFDYWGQGTMVTVSSGGGGSGGGGSGG |
| | | | GGSGGGGSDSVTTQSPLSLPVTLGQPASISCSGE |
| | | | KLSDKYVHWYQQRPGQSPRMLIYENDRRPSGV |
| | | | PDRFSGSNSGNDATLKISRVEAEDVGVYFCQFW |
| | | | ASTASAVFGGGTKVEIK |
| SEQ | BKM0145 | | EIQLLESGGGLVQPGGSLRLSCAVSGFSITTTGY |
| ID NO: | scFv | | HWNWVRQAPGKGLEWVGYIYSSGSTSYAPSLK |
| 491 | | | SRFTISRDTSKNTFYLQMNSLRAEDTAVYYCAR |
| | | | GDWHYFDYWGQGTMVTVSSGGGGSGGGGSGG |
| | | | GGSGGGGSSSETTQPPSVSVSPGQTASITCSGEK |
| | | | LSDKYVHWYQQKPGQSPVMVIYENDRRPSGIPE |
| | | | RFSGSNSGNTATLTISGTQAMDEADYFCQFWAS |
| | | | TASAVFGGGTQLTVL |

[0490] In some embodiments, the NK cell engager is an antigen binding domain that binds to NKp46 (e.g., NKp46 present, e.g., expressed or displayed, on the surface of an NK cell) and comprises any CDR amino acid sequence, framework region (FWR) amino acid sequence, or variable region amino acid sequence disclosed in Table 15. In some embodiments, binding of the NK cell engager, e.g., antigen binding domain that binds to NKp46, to the NK cell activates the NK cell. An antigen binding domain that binds to NKp46 (e.g., NKp46 present, e.g., expressed or displayed, on the surface of an NK cell) may be said to target NKp46, the NK cell, or both.

[0491] In some embodiments, the NK cell engager is an antigen binding domain that binds to NKG2D (e.g., NKG2D present, e.g., expressed or displayed, on the surface of an NK cell) and comprises any CDR amino acid sequence, framework region (FWR) amino acid sequence, or variable region amino acid sequence disclosed in Table 15. In some embodiments, binding of the NK cell engager, e.g., antigen binding domain that binds to NKG2D, to the NK cell activates the NK cell. An antigen binding domain that binds to NKG2D (e.g., NKG2D present, e.g., expressed or displayed, on the surface of an NK cell) may be said to target NKG2D, the NK cell, or both.

[0492] In some embodiments, the NK cell engager is an antigen binding domain that binds to CD16 (e.g., CD16 present, e.g., expressed or displayed, on the surface of an NK cell) and comprises any CDR amino acid sequence, framework region (FWR) amino acid sequence, or variable region amino acid sequence disclosed in Table 15. In some embodiments, binding of the NK cell engager, e.g., antigen binding domain that binds to CD16, to the NK cell activates the NK cell. An antigen binding domain that binds to CD16 (e.g., CD16 present, e.g., expressed or displayed, on the surface of an NK cell) may be said to target CD16, the NK cell, or both.

TABLE 15
Exemplary variable regions of NKp46, NKG2D, or CD16-targeting antigen binding
domains

| SEQ | | | |
|---|---|---|---|
| ID NO | Ab ID | Description | Sequence |
| SEQ | NKG2D_ | scFv that | QVHLQESGPGLVKPSETLSLTCTVSDDSISSYYWSWIRQ |
| ID NO: | 1scFv | binds | PPGKGLEWIGHISYSGSANYNPSLKSRVTISVDTSKNQF |
| 6175 | | NKG2D | SLKLSSVTAADTAVYYCANWDDAFNIWGQGTMVTVSS |
| | | | GGGGSGGGGSGGGGSGGGGSEIVLTQSPGTLSLSPGER |
| | | | ATLSCRASQSVSSSYLAWYQQKPGQAPRLLIYGASSRA |
| | | | TGIPDRFSGSGSGTDFTLTISRLEPEDFAVYYCQQYGS |
| | | | WSPTFGQGTKVEIK |
| SEQ | NKG2D_ | VH that | QVHLQESGPGLVKPSETLSLTCTVSDDSISSYYWSWIRQ |
| ID NO: | 1VH | binds | PPGKGLEWIGHISYSGSANYNPSLKSRVTISVDTSKNQF |
| 6176 | | NKG2D | SLKLSSVTAADTAVYYCANWDDAFNIWGQGTMVTVSS |
| SEQ | NKG2D_ | VL that | EIVLTQSPGTLSLSPGERATLSCRASQSVSSSYLAWYQQ |
| ID NO: | 1VL | binds | KPGQAPRLLIYGASSRATGIPDRFSGSGSGTDFTLTISRL |
| 6177 | | NKG2D | EPEDFAVYYCQQYGSSPWTFGQGTKVEIK |
| SEQ | NKG2D_ | scFv that | EVQLVQSGAEVKEPGESLKISCKNSGYSFTNYWVGWV |
| ID NO: | 2scFv | binds | RQMPGKGLEWMGIIYPGDSDTRYSPSFQGQVTISADKSI |
| 6178 | | NKG2D | NTAYLQWSSLKASDTAMYYCGRLTMFRGIIIGYFDYW |
| | | | GQGTLVTVSSGGGGSGGGGSGGGGSGGGGSEIVLTQSP |
| | | | ATLSLSPGERATLSCRASQSVSSYLAWYQQKPGQAPRL |
| | | | LIYDASNRATGIPARFSGSGSGTDFTLTISSLEPEDFA |
| | | | VYYCQQRSNWPWTFGQGTKVEIK |
| SEQ | NKG2D_ | VH that | EVQLVQSGAEVKEPGESLKISCKNSGYSFTNYWVGWV |
| ID NO: | 2VH | binds | RQMPGKGLEWMGIIYPGDSDTRYSPSFQGQVTISADKSI |
| 6179 | | NKG2D | NTAYLQWSSLKASDTAMYYCGRLTMFRGIIIGYFDYW |
| | | | GQGTLVTVSS |
| SEQ | NKG2D_ | VL that | EIVLTQSPATLSLSPGERATLSCRASQSVSSYLAWYQQK |
| ID NO: | 2VL | binds | PGQAPRLLIYDASNRATGIPARFSGSGSGTDFTLTISSLEP |
| 6180 | | NKG2D | EDFAVYYCQQRSNWPWTFGQGTKVEIK |
| SEQ | NKp46 | scFv that | QVQLQQSGPELVKPGASVKMSCKASGYTFTDYVINWG |
| ID NO: | scFv | binds | KQRSGQGLEWIGEIYPGSGTNYYNEKFKAKATLTADKS |
| 6181 | | NKp46 | SNIAYMQLSSLTSEDSAVYFCARRGRYGLYAMDYWGQ |
| | | | GTSVTVSSGGGGSGGGGSGGGGSGGGGSDIQMTQTTSS |
| | | | LSASLGDRVTISCRASQDISNYLNWYQQKPDGTVKLLIY |
| | | | YTSRLHSGVPSRFSGSGSGTDYSLTINNLEQEDIATYFCQ |
| | | | QGNTRPWTFGGGTKLEIK |
| SEQ | NKp46VH | VH that | QVQLQQSGPELVKPGASVKMSCKASGYTFTDYVINWG |
| ID NO: | | binds | KQRSGQGLEWIGEIYPGSGTNYYNEKFKAKATLTADKS |
| 6182 | | NKp46 | SNIAYMQLSSLTSEDSAVYFCARRGRYGLYAMDYWGQ |
| | | | GTSVTVSS |
| SEQ | NKp46VL | VL that | DIQMTQTTSSLSASLGDRVTISCRASQDISNYLNWYQQK |
| ID NO: | | binds | PDGTVKLLIYYTSRLHSGVPSRFSGSGSGTDYSLTINNLE |
| 6183 | | NKp46 | QEDIATYFCQQGNTRPWTFGGGTKLEIK |
| SEQ | CD16scFv | scFv that | EVQLVESGG GVVRPGGSLR LSCAASGFTF |
| ID NO: | | binds | DDYGMSWVRQ APGKGLEWVS |
| 6184 | | CD16 | GINWNGGSTG YADSVKGRFT ISRDNAKNSL |
| | | | YLQMNSLRAE DTAVYYCARG |
| | | | RSLLFDYWGQ GTLVTVSRGG GGSGGGGSGG |
| | | | GGSSELTQDP AVSVALGQTV |
| | | | RITCQGDSLR SYYASWYQQK PGQAPVLVIY |
| | | | GKNNRPSGIP DRFSGSSSGN |
| | | | TASLTITGAQ AEDEADYYCN SRDSSGNHVV |
| | | | FGGGTKLTVL |
| SEQ | CD16VH | VH that | EVQLVESGG GVVRPGGSLR LSCAASGFTF |
| ID NO: | | binds | DDYGMSWVRQ APGKGLEWVS |
| 6185 | | CD16 | GINWNGGSTG YADSVKGRFT ISRDNAKNSL |
| | | | YLQMNSLRAE DTAVYYCARG |
| | | | RSLLFDYWGQ GTLVTVSR |
| SEQ | CD16VL | VL that | SSELTQDP AVSVALGQTVRITCQGDSLR |
| ID NO: | | binds | SYYASWYQQK PGQAPVLVIY GKNNRPSGIP |
| 6186 | | CD16 | DRFSGSSSGNTASLTITGAQ AEDEADYYCN |
| | | | SRDSSGNHVV FGGGTKLTVL |

[0493] In one embodiment, the NK cell engager is a ligand of NKp30, e.g., is a B37-6, e.g., comprises the amino acid sequence of:

(SEQ ID NO: 7233)
DLKVEMMAGGTQITPLNDNVTIFCNIFYSQPLNITSMGIT
WFWKSLTFDKEVKVFEFFGDHQEAFRPGAIVSPWRLKSGD
ASLRLPGIQLEEAGEYRCEVVVTPLKAQGTVQLEVVASPA
SRLLLDQVGMKENEDKYMCESSGFYPEAINITWEKQTQKF
PHPIEISEDVITGPTIKNMDGTFNVTSCLKLNSSQEDPGT
VYQCVVRHASLHTPLRSNFTLTAARHSLSETEKTDNFS,

a fragment thereof, or an amino acid sequence substantially identical thereto (e.g., 95% to 99.9% identical thereto, or having at least one amino acid alteration, but not more than five, ten or fifteen alterations (e.g., substitutions, deletions, or insertions, e.g., conservative substitutions) to the amino acid sequence of SEQ ID NO: 7233.

[0494] In other embodiments, the NK cell engager is a ligand of NKp44 or NKp46, which is a viral HA. Viral hemagglutinins (HA) are glyco proteins which are on the surface of viruses. HA proteins allow viruses to bind to the membrane of cells via sialic acid sugar moieties which contributes to the fusion of viral membranes with the cell membranes (see e.g., Eur J Immunol. 2001 September; 31(9):2680-9 “Recognition of viral hemagglutinins by NKp44 but not by NKp30”; and Nature. 2001 Feb. 22; 409(6823):1055-60 “Recognition of haemagglutinins on virus-infected cells by NKp46 activates lysis by human NK cells” the contents of each of which are incorporated by reference herein).

[0495] In other embodiments, the NK cell engager is a ligand of NKG2D chosen from MICA, MICB, or ULBP1, e.g., wherein:

### (i) MICA Comprises the Amino Acid Sequence:

[0496] EPHSLRYNLTVLSWDGSVQSGFLTEVHLDGQPFLRCDRQKCRAKPQGQWAEDVLGNKTWD RETRDLTGNGKDLRMTLAHIKDQKEGLHSLQEIRVCEIHEDNSTRSSQHFYYDGELFLSQNLE TKEWTMPQSSRAQTLAMNVRNFLKEDAMKTKTHYHAMHADCLQELRRYLKSGVVLRRTV PPMVNVTRSEASEGNITVTCRASGFYPWNITLSWRQDGVSLSHDTQQWGDVLPDGNGTYQT WVATRICQGEEQRFTCYMEHSGNHSTHPVPSGKVLVLQSHW (SEQ ID NO: 7234), a fragment thereof, or an amino acid sequence substantially identical thereto (e.g., 95% to 99.9% identical thereto, or having at least one amino acid alteration, but not more than five, ten or fifteen alterations (e.g., substitutions, deletions, or insertions, e.g., conservative substitutions) to the amino acid sequence of SEQ ID NO: 7234;

### (ii) MICB Comprises the Amino Acid Sequence:

[0497] AEPHSLRYNLMVLSQDESVQSGFLAEGHLDGQPFLRYDRQKRRAKPQGQWAEDVLGAKTW DTETEDLTENGQDLRRTLTHIKDQKGGLHSLQEIRVCEIHEDSSTRGSRHFYYDGELFLSQNL ETQESTVPQSSRAQTLAMNVTNFWKEDAMKTKTHYRAMQADCLQKLQRYLKSGVAIRRTV PPMVNVTCSEVSEGNITVTCRASSFYPRNITLTWRQDGVSLSHNTQQWGDVLPDGNGTYQT WVATRIRQGEEQRFTCYMEHSGNHGTHPVPSGKVLVLQSQRTD (SEQ ID NO: 7235), a fragment thereof, or an amino acid sequence substantially identical thereto (e.g., 95% to 99.9% identical thereto, or having at least one amino acid alteration, but not more than five, ten or fifteen alterations (e.g., substitutions, deletions, or insertions, e.g., conservative substitutions) to the amino acid sequence of SEQ ID NO: 7235; or

(iii) ULBP1 Comprises the Amino Acid Sequence:

[0498] GWVDTHCLCYDFIITPKSRPEPQWCEVQGLVDERPFLHYDCVNHKAKAFASLGKKVNVTKT WEEQTETLRDVVDFLKGQLLDIQVENLIPIEPLTLQARMSCEHEAHGHGRGSWQFLFNGQKF LLFDSNNRKWTALHPGAKKMTEKWEKNRDVTMFFQKISLGDCKMWLEEFLMYWEQMLDP TKPPSLAPG (SEQ ID NO: 7236), a fragment thereof, or an amino acid sequence substantially identical thereto (e.g., 95% to 99.9% identical thereto, or having at least one amino acid alteration, but not more than five, ten or fifteen alterations (e.g., substitutions, deletions, or insertions, e.g., conservative substitutions) to the amino acid sequence of SEQ ID NO: 7236.

[0499] In other embodiments, the NK cell engager is a ligand of DNAM1 chosen from NECTIN2 or NECL5, e.g., wherein:

### (i) NECTIN2 Comprises the Amino Acid Sequence:

[0500] QDVRVQVLPEVRGQLGGTVELPCHLLPPVPGLYISLVTWQRPDAPANHQNVAAFHPKMGPS FPSPKPGSERLSFVSAKQSTGQDTEAELQDATLALHGLTVEDEGNYTCEFATFPKGSVRGMT WLRVIAKPKNQAEAQKVTFSQDPTTVALCISKEGRPPARISWLSSLDWEAKETQVSGTLAGT VTVTSRFTLVPSGRADGVTVTCKVEHESFEEPALIPVTLSVRYPPEVSISGYDDNWYLGRTDA TLSCDVRSNPEPTGYDWSTTSGTFPTSAVAQGSQLVIHAVDSLFNTTFVCTVTNAVGMGRAE QVIFVRETPNTAGAGATGG (SEQ ID NO: 7237), a fragment thereof, or an amino acid sequence substantially identical thereto (e.g., 95% to 99.9% identical thereto, or having at least one amino acid alteration, but not more than five, ten or fifteen alterations (e.g., substitutions, deletions, or insertions, e.g., conservative substitutions) to the amino acid sequence of SEQ ID NO: 7237; or

### (ii) NECL5 Comprises the Amino Acid Sequence:

[0501] WPPPGTGDVVVQAPTQVPGFLGDSVTLPCYLQVPNMEVTHVSQLTWARHGESGSMAVFHQ TQGPSYSESKRLEFVAARLGAELRNASLRMFGLRVEDEGNYTCLFVTFPQGSRSVDIWLRVL AKPQNTAEVQKVQLTGEPVPMARCVSTGGRPPAQITWHSDLGGMPNTSQVPGFLSGTVTVT SLWILVPSSQVDGKNVTCKVEHESFEKPQLLTVNLTVYYPPEVSISGYDNNWYLGQNEATLT CDARSNPEPTGYNWSTTMGPLPPFAVAQGAQLLIRPVDKPINTTLICNVTNALGARQAELTV QVKEGPPSEHSGISRN (SEQ ID NO: 7238), a fragment thereof, or an amino acid sequence substantially identical thereto (e.g., 95% to 99.9% identical thereto, or having at least one amino acid alteration, but not more than five, ten or fifteen alterations (e.g., substitutions, deletions, or insertions, e.g., conservative substitutions) to the amino acid sequence of SEQ ID NO: 7238.

[0502] In yet other embodiments, the NK cell engager is a ligand of DAP10, which is an adapter for NKG2D (see e.g., Proc Natl Acad Sci USA. 2005 May 24; 102(21): 7641-7646; and Blood, 15 Sep. 2011 Volume 118, Number 11, the full contents of each of which is incorporated by reference herein).

[0503] In other embodiments, the NK cell engager is a ligand of CD16, which is a CD16a/b ligand, e.g., a CD16a/b ligand further comprising an antibody Fc region (see e.g., Front Immunol. 2013; 4: 76 discusses how antibodies use the Fc to trigger NK cells through CD16, the full contents of which are incorporated herein).

[0504] In other embodiments, the NK cell engager is a ligand of CRTAM, which is NECL2, e.g., wherein NECL2 comprises the amino acid sequence: QNLFTKDVTVIEGEVATISCQVNKSDDSVIQLLNPNRQTIYFRDFRPLKDSRFQLLNFSSSELK VSLTNVSISDEGRYFCQLYTDPPQESYTTITVLVPPRNLMIDIQKDTAVEGEEIEVNCTAMASK PATTIRWFKGNTELKGKSEVEEWSDMYTVTSQLMLKVHKEDDGVPVICQVEHPAVTGNLQT QRYLEVQYKPQVHIQMTYPLQGLTREGDALELTCEAIGKPQPVMVTWVRVDDEMPQHAVL SGPNLFINNLNKTDNGTYRCEASNIVGKAHSDYMLYVYDPPTTIPPPTTTTTTTTTTTTTILTII TDSRAGEEGSIRAVDH (SEQ ID NO: 7239), a fragment thereof, or an amino acid sequence substantially identical thereto (e.g., 95% to 99.9% identical thereto, or having at least one amino acid alteration, but not more than five, ten or fifteen alterations (e.g., substitutions, deletions, or insertions, e.g., conservative substitutions) to the amino acid sequence of SEQ ID NO: 7239.

[0505] In other embodiments, the NK cell engager is a ligand of CD27, which is CD70, e.g., wherein CD70 comprises the amino acid sequence: QRFAQAQQQLPLESLGWDVAELQLNHTGPQQDPRLYWQGGPALGRSFLHGPELDKGQLRIH RDGIYMVHIQVTLAICSSTTASRHHPTTLAVGICSPASRSISLLRLSFHQGCTIASQRLTPLARG DTLCTNLTGTLLPSRNTDETFFGVQWVRP (SEQ ID NO: 7240), a fragment thereof, or an amino acid sequence substantially identical thereto (e.g., 95% to 99.9% identical thereto, or having at least one amino acid alteration, but not more than five, ten or fifteen alterations (e.g., substitutions, deletions, or insertions, e.g., conservative substitutions) to the amino acid sequence of SEQ ID NO: 7240.

[0506] In other embodiments, the NK cell engager is a ligand of PSGL1, which is L-selectin (CD62L), e.g., wherein L-selectin comprises the amino acid sequence: WTYHYSEKPMNWQRARRFCRDNYTDLVAIQNKAEIEYLEKTLPFSRSYYWIGIRKIGGIWTW VGTNKSLTEEAENWGDGEPNNKKNKEDCVEIYIKRNKDAGKWNDDACHKLKAALCYTASC QPWSCSGHGECVEIINNYTCNCDVGYYGPQCQFVIQCEPLEAPELGTMDCTHPLGNFSFSSQC AFSCSEGTNLTGIEETTCGPFGNWSSPEPTCQVIQCEPLSAPDLGIMNCSHPLASFSFTSACTFIC SEGTELIGKKKTICESSGIWSNPSPICQKLDKSFSMIKEGDYN (SEQ ID NO: 7241), a fragment thereof, or an amino acid sequence substantially identical thereto (e.g., 95% to 99.9% identical thereto, or having at least one amino acid alteration, but not more than five, ten or fifteen alterations (e.g., substitutions, deletions, or insertions, e.g., conservative substitutions) to the amino acid sequence of SEQ ID NO: 7241.

[0507] In other embodiments, the NK cell engager is a ligand of CD96, which is NECL5, e.g., wherein NECL5 comprises the amino acid sequence: WPPPGTGDVVVQAPTQVPGFLGDSVTLPCYLQVPNMEVTHVSQLTWARHGESGSMAVFHQ TQGPSYSESKRLEFVAARLGAELRNASLRMFGLRVEDEGNYTCLFVTFPQGSRSVDIWLRVL AKPQNTAEVQKVQLTGEPVPMARCVSTGGRPPAQITWHSDLGGMPNTSQVPGFLSGTVTVT SLWILVPSSQVDGKNVTCKVEHESFEKPQLLTVNLTVYYPPEVSISGYDNNWYLGQNEATLT CDARSNPEPTGYNWSTTMGPLPPFAVAQGAQLLIRPVDKPINTTLICNVTNALGARQAELTV QVKEGPPSEHSGISRN (SEQ ID NO: 7238), a fragment thereof, or an amino acid sequence substantially identical thereto (e.g., 95% to 99.9% identical thereto, or having at least one amino acid alteration, but not more than five, ten or fifteen alterations (e.g., substitutions, deletions, or insertions, e.g., conservative substitutions) to the amino acid sequence of SEQ ID NO: 7238.

[0508] In other embodiments, the NK cell engager is a ligand of CD100 (SEMA4D), which is CD72, e.g., wherein CD72 comprises the amino acid sequence: RYLQVSQQLQQTNRVLEVTNSSLRQQLRLKITQLGQSAEDLQGSRRELAQSQEALQVEQRAH QAAEGQLQACQADRQKTKETLQSEEQQRRALEQKLSNMENRLKPFFTCGSADTCCPSGWIM HQKSCFYISLTSKNWQESQKQCETLSSKLATFSEIYPQSHSYYFLNSLLPNGGSGNSYWTGLS SNKDWKLTDDTQRTRTYAQSSKCNKVHKTWSWWTLESESCRSSLPYICEMTAFRFPD (SEQ ID NO: 7242), a fragment thereof, or an amino acid sequence substantially identical thereto (e.g., 95% to 99.9% identical thereto, or having at least one amino acid alteration, but not more than five, ten or fifteen alterations (e.g., substitutions, deletions, or insertions, e.g., conservative substitutions) to the amino acid sequence of SEQ ID NO: 7242.

[0509] In other embodiments, the NK cell engager is a ligand of NKp80, which is CLEC2B (AICL), e.g., wherein CLEC2B (AICL) comprises the amino acid sequence: KLTRDSQSLCPYDWIGFQNKCYYFSKEEGDWNSSKYNCSTQHADLTIIDNIEEMNFLRRYKC SSDHWIGLKMAKNRTGQWVDGATFTKSFGMRGSEGCAYLSDDGAATARCYTERKWICRKR IH (SEQ ID NO: 7243), a fragment thereof, or an amino acid sequence substantially identical thereto (e.g., 95% to 99.9% identical thereto, or having at least one amino acid alteration, but not more than five, ten or fifteen alterations (e.g., substitutions, deletions, or insertions, e.g., conservative substitutions) to the amino acid sequence of SEQ ID NO: 7243.

[0510] In other embodiments, the NK cell engager is a ligand of CD244, which is CD48, e.g., wherein CD48 comprises the amino acid sequence: QGHLVHMTVVSGSNVTLNISESLPENYKQLTWFYTFDQKIVEWDSRKSKYFESKFKGRVRLD PQSGALYISKVQKEDNSTYIMRVLKKTGNEQEWKIKLQVLDPVPKPVIKIEKIEDMDDNCYL KLSCVIPGESVNYTWYGDKRPFPKELQNSVLETTLMPHNYSRCYTCQVSNSVSSKNGTVCLS PPCTLARS (SEQ ID NO: 7244), a fragment thereof, or an amino acid sequence substantially identical thereto (e.g., 95% to 99.9% identical thereto, or having at least one amino acid alteration, but not more than five, ten or fifteen alterations (e.g., substitutions, deletions, or insertions, e.g., conservative substitutions) to the amino acid sequence of SEQ ID NO: 7244.

[0511] In some embodiments, the NK cell engager is a viral hemagglutinin (HA), HA is a glycoprotein found on the surface of influenza viruses. It is responsible for binding the virus to cells with sialic acid on the membranes, such as cells in the upper respiratory tract or erythrocytes. HA has at least 18 different antigens. These subtypes are named H1 through H18. NCRs can recognize viral proteins. NKp46 has been shown to be able to interact with the HA of influenza and the HA-NA of Paramyxovirus, including Sendai virus and Newcastle disease virus. Besides NKp46, NKp44 can also functionally interact with HA of different influenza subtypes.

### Death Receptor Signal Engagers

[0512] Death receptors, e.g., death receptors 4 and 5 (DR4 and DR5, also known as TRAIL-R1 and TRAIL-R2 respectively), are trimeric type I transmembrane proteins widely expressed in normal human tissues. Activation of death receptors causes intracellular signaling that induces cell death. TNF-related apoptosis-inducing ligand (TRAIL) (also known as Apo2L) is a trimeric protein that binds to Death receptors, activating their cell death-inducing signaling (Amarante-Mendes and Griffith. Pharmacol Ther. 2015 November; 155:117-31).

[0513] The present disclosure provides, inter alia, multispecific (e.g., bi-, tri-, quad-specific) or multifunctional molecules, that are engineered to contain one or more death receptor signal engagers that mediate binding to death receptors and/or activation of death receptor signaling on a target cell (e.g., a tumor antigen presenting cell (e.g., cancer cell, e.g., a lymphoma cell), or a lymphocyte expressing TRBC1 or TRBC2). Accordingly, in some embodiments, the death receptor signal engager comprises one or more TRAIL polypeptides or a fragment thereof (TRAIL molecule), one or more death receptors or a fragment thereof (death receptor molecule), or one or more antigen binding domains that specifically binds to a death receptor (e.g., and activates death receptor signaling). Without wishing to be bound by theory, it is thought that a death receptor signal engager that can activate death receptor signaling on a target cell can induce the death of the target cell, e.g., a target disease cell, e.g., a target cancer cell.

[0514] Death receptor signal engagers may comprise TRAIL molecules and/or death receptor molecules from or derived from versions of TRAIL and death receptors known to those skilled in the art. In some embodiments, the death receptor signal engager comprises a human TRAIL molecule or death receptor molecule. In some embodiments, the death receptor signal engager comprises a mouse TRAIL molecule or death receptor molecule. In some embodiments, the death receptor signal engager comprises a mammalian TRAIL molecule or death receptor molecule. In some embodiments, the death receptor signal engager comprises a truncated TRAIL molecule or death receptor molecule (e.g., relative to a wild-type TRAIL molecule or death receptor molecule).

[0515] In some embodiments, the death receptor signal engager comprises a truncated TRAIL molecule comprising at least residues corresponding to amino acids 95-281 of human TRAIL, e.g., a truncated TRAIL molecule comprising residues corresponding to amino acids 95-281 of human TRAIL. In some embodiments, the death receptor signal engager comprises a truncated TRAIL molecule comprising residues of 95-281 of human TRAIL.

[0516] In some embodiments, the death receptor signal engager comprises a truncated TRAIL molecule comprising at least residues corresponding to amino acids 122-281 of human TRAIL, e.g., a truncated TRAIL molecule comprising residues corresponding to amino acids 122-281 of human TRAIL. In some embodiments, the death receptor signal engager comprises a truncated TRAIL molecule comprising residues of 122-281 of human TRAIL.

[0517] In some embodiments, the death receptor signal engager comprises one, two, or three TRAIL molecules (e.g., the death receptor signal engager is a monomeric, dimeric, or trimeric TRAIL molecule, respectively). In some embodiments, the death receptor signal engager comprises one, two, or three death receptor molecules (e.g., the death receptor signal engager is a monomeric, dimeric, or trimeric death receptor molecule, respectively). In some embodiments, the death receptor signal engager comprises one, two, or three antigen binding domains that specifically bind to a death receptor (e.g., to one or more death receptors, e.g., the same or different death receptors)

[0518] In some embodiments, the death receptor signal engager comprises an amino acid sequence selected from Table 11 (or an amino acid sequence having at least about 77%, 80%, 85%, 90%, 95%, or 99% sequence identity to a sequence selected from Table 11).

[0519] In some embodiments, the death receptor signal engager comprises an amino acid sequence of SEQ ID NO: 6157 (or an amino acid sequence having at least about 77%, 80%, 85%, 90%, 95%, or 99% sequence identity to SEQ ID NO: 6157).

[0520] In some embodiments, the death receptor signal engager comprises an amino acid sequence of SEQ ID NO: 6158 (or an amino acid sequence having at least about 77%, 80%, 85%, 90%, 95%, or 99% sequence identity to SEQ ID NO: 6158).

[0521] In some embodiments, the death receptor signal engager comprises an amino acid sequence of SEQ ID NO: 6159 (or an amino acid sequence having at least about 77%, 80%, 85%, 90%, 95%, or 99% sequence identity to SEQ ID NO: 6159).

[0522] In some embodiments, the death receptor signal engager comprises an amino acid sequence of SEQ ID NO: 6160 (or an amino acid sequence having at least about 77%, 80%, 85%, 90%, 95%, or 99% sequence identity to SEQ ID NO: 6160).

[0523] In some embodiments, the death receptor signal engager comprises an amino acid sequence of SEQ ID NO: 6161 (or an amino acid sequence having at least about 77%, 80%, 85%, 90%, 95%, or 99% sequence identity to SEQ ID NO: 6161).

[0524] In some embodiments, the death receptor signal engager comprises an amino acid sequence of SEQ ID NO: 6162 (or an amino acid sequence having at least about 77%, 80%, 85%, 90%, 95%, or 99% sequence identity to SEQ ID NO: 6162).

[0525] In some embodiments, the death receptor signal engager comprises an amino acid sequence of SEQ ID NO: 6163 (or an amino acid sequence having at least about 77%, 80%, 85%, 90%, 95%, or 99% sequence identity to SEQ ID NO: 6163).

[0526] In some embodiments, the death receptor signal engager comprises an amino acid sequence of SEQ ID NO: 6164 (or an amino acid sequence having at least about 77%, 80%, 85%, 90%, 95%, or 99% sequence identity to SEQ ID NO: 6164).

[0527] In some embodiments, the death receptor signal engager comprises an amino acid sequence of SEQ ID NO: 6165 (or an amino acid sequence having at least about 77%, 80%, 85%, 90%, 95%, or 99% sequence identity to SEQ ID NO: 6165).

[0528] In some embodiments, the death receptor signal engager is comprised on the same polypeptide chain as another component of a multifunctional molecule of the present disclosure, e.g., the death receptor signal engager is comprised on the same polypeptide chain as a heavy and/or light chain of a first antigen binding domain that preferentially binds to a tumor antigen on a lymphoma cell (e.g., T cell), wherein the tumor antigen is T cell receptor beta chain constant domain 1 (TRBC1) or T cell receptor beta chain constant domain 2 (TRBC2), a heavy and/or light chain of a first antigen binding domain that selectively targets lymphocytes expressing T cell receptor beta chain constant domain 1 (TRBC1) or T cell receptor beta chain constant domain 2 (TRBC2), an immune cell engager, a cytokine molecule, or a stromal modified moiety, e.g., as a fusion protein. In some embodiments, the multifunctional molecule comprises a fusion protein comprising a death receptor signal engager and light chain of a first antigen binding domain that preferentially binds to a tumor antigen on a lymphoma cell (e.g., T cell), wherein the tumor antigen is T cell receptor beta chain constant domain 1 (TRBC1) or T cell receptor beta chain constant domain 2 (TRBC2). In some embodiments, the multifunctional molecule comprises a fusion protein comprising a death receptor signal engager and a light chain of a first antigen binding domain that selectively targets lymphocytes expressing T cell receptor beta chain constant domain 1 (TRBC1) or T cell receptor beta chain constant domain 2 (TRBC2).

[0529] In some embodiments, the fusion protein comprising a death receptor signal engager and a light chain of a first antigen binding domain targeting TRBC1 comprises an amino acid sequence of SEQ ID NO: 6170 (or an amino acid sequence having at least about 77%, 80%, 85%, 90%, 95%, or 99% sequence identity to SEQ ID NO: 6170).

[0530] In some embodiments, the fusion protein comprising a death receptor signal engager and a light chain of a first antigen binding domain targeting TRBC1 comprises an amino acid sequence of SEQ ID NO: 6171 (or an amino acid sequence having at least about 77%, 80%, 85%, 90%, 95%, or 99% sequence identity to SEQ ID NO: 6171).

[0531] In some embodiments, the fusion protein comprising a death receptor signal engager and a light chain of a first antigen binding domain targeting TRBC1 comprises an amino acid sequence of SEQ ID NO: 6172 (or an amino acid sequence having at least about 77%, 80%, 85%, 90%, 95%, or 99% sequence identity to SEQ ID NO: 6172).

[0532] In some embodiments, the multifunctional molecule comprises a fusion protein comprising a death receptor signal engager and a light chain of a first antigen binding domain targeting TRBC1 comprising an amino acid sequence of SEQ ID NO: 6170 (or an amino acid sequence having at least about 77%, 80%, 85%, 90%, 95%, or 99% sequence identity to SEQ ID NO: 6170), and a heavy chain of the first antigen binding domain targeting TRBC1 comprising an amino acid sequence of SEQ ID NO: 6167 (or an amino acid sequence having at least about 77%, 80%, 85%, 90%, 95%, or 99% sequence identity to SEQ ID NO: 6167). In some embodiments, the multifunctional molecule comprises a fusion protein comprising a death receptor signal engager and a light chain of a first antigen binding domain targeting TRBC1 comprising an amino acid sequence of SEQ ID NO: 6170 (or an amino acid sequence having at least about 77%, 80%, 85%, 90%, 95%, or 99% sequence identity to SEQ ID NO: 6170), and a heavy chain of the first antigen binding domain targeting TRBC1 comprising an amino acid sequence of SEQ ID NO: 6168 (or an amino acid sequence having at least about 77%, 80%, 85%, 90%, 95%, or 99% sequence identity to SEQ ID NO: 6168).

[0533] In some embodiments, the multifunctional molecule comprises a fusion protein comprising a death receptor signal engager and a light chain of a first antigen binding domain targeting TRBC1 comprising an amino acid sequence of SEQ ID NO: 6171 (or an amino acid sequence having at least about 77%, 80%, 85%, 90%, 95%, or 99% sequence identity to SEQ ID NO: 6171), and a heavy chain of the first antigen binding domain targeting TRBC1 comprising an amino acid sequence of SEQ ID NO: 6167 (or an amino acid sequence having at least about 77%, 80%, 85%, 90%, 95%, or 99% sequence identity to SEQ ID NO: 6167). In some embodiments, the multifunctional molecule comprises a fusion protein comprising a death receptor signal engager and a light chain of a first antigen binding domain targeting TRBC1 comprising an amino acid sequence of SEQ ID NO: 6171 (or an amino acid sequence having at least about 77%, 80%, 85%, 90%, 95%, or 99% sequence identity to SEQ ID NO: 6171), and a heavy chain of the first antigen binding domain targeting TRBC1 comprising an amino acid sequence of SEQ ID NO: 6168 (or an amino acid sequence having at least about 77%, 80%, 85%, 90%, 95%, or 99% sequence identity to SEQ ID NO: 6168).

[0534] In some embodiments, the multifunctional molecule comprises a fusion protein comprising a death receptor signal engager and a light chain of a first antigen binding domain targeting TRBC1 comprising an amino acid sequence of SEQ ID NO: 6172 (or an amino acid sequence having at least about 77%, 80%, 85%, 90%, 95%, or 99% sequence identity to SEQ ID NO: 6172), and a heavy chain of the first antigen binding domain targeting TRBC1 comprising an amino acid sequence of SEQ ID NO: 6167 (or an amino acid sequence having at least about 77%, 80%, 85%, 90%, 95%, or 99% sequence identity to SEQ ID NO: 6167). In some embodiments, the multifunctional molecule comprises a fusion protein comprising a death receptor signal engager and a light chain of a first antigen binding domain targeting TRBC1 comprising an amino acid sequence of SEQ ID NO: 6172 (or an amino acid sequence having at least about 77%, 80%, 85%, 90%, 95%, or 99% sequence identity to SEQ ID NO: 6172), and a heavy chain of the first antigen binding domain targeting TRBC1 comprising an amino acid sequence of SEQ ID NO: 6168 (or an amino acid sequence having at least about 77%, 80%, 85%, 90%, 95%, or 99% sequence identity to SEQ ID NO: 6168).

TABLE 11
Exemplary death receptor signal engagers

| SEQ | | | |
|---|---|---|---|
| ID NO | ID Ref. | Description | Sequence |
| SEQ | monomeric_ | Monomeric | METDTLLLWVLLLWVPGSTGDYKDDDDKGGGGSG |
| ID NO: | hTRAIL_aa | human | TGGAAAHITGTRGRSNTLSSPNSKNEKALGRKINSW |
| 6157 | 122_281- | TRAIL | ESSRSGHSFLSNLHLRNGELVIHEKGFYYIYSQTYFRF |
| | hFc_Knob_ | comprising | QEEIKENTKNDKQMVQYIYKYTSYPDPILLMKSARN |
| | Cys-Blank | residues | SCWSKDAEYGLYSIYQGGIFELKENDRIFVSVTNEHL |
| | | 122-281 | IDMDHEASFFGAFAVSGSGNGTSNGTSGSSGGDKTH |
| | | | TCPPCPAPELLGGPSVFLFPPKPKDTLMISRTPEVTCV |
| | | | VVDVSHEDPEVKFNWYVDGVEVHNAKTKPREEQY |
| | | | NSTYRVVSVLTVLHQDWLNGKEYKCKVSNKALPAP |
| | | | IEKTISKAKGQPREPQVYTLPPCREEMTKNQVSLWCL |
| | | | VKGFYPSDIAVEWESNGQPENNYKTTPPVLDSDGSFF |
| | | | LYSKLTVDKSRWQQGNVFSCSVMHEALHNHYTQKS |
| | | | LSLSPGK |
| SEQ | dimeric_hT | Dimeric | METDTLLLWVLLLWVPGSTGDYKDDDDKGGGGSG |
| ID NO: | RAIL_aa12 | human | TGGAAAHITGTRGRSNTLSSPNSKNEKALGRKINSW |
| 6158 | 2_281- | TRAIL | ESSRSGHSFLSNLHLRNGELVIHEKGFYYIYSQTYFRF |
| | hFc_Knob_ | comprising | QEEIKENTKNDKQMVQYIYKYTSYPDPILLMKSARN |
| | Cys-Blank | residues | SCWSKDAEYGLYSIYQGGIFELKENDRIFVSVTNEHL |
| | | 122-281 | IDMDHEASFFGAFAVSGAAAHITGTRGRSNTLSSPNS |
| | | | KNEKALGRKINSWESSRSGHSFLSNLHLRNGELVIHE |
| | | | KGFYYIYSQTYFRFQEEIKENTKNDKQMVQYIYKYT |
| | | | SYPDPILLMKSARNSCWSKDAEYGLYSIYQGGIFELK |
| | | | ENDRIFVSVTNEHLIDMDHEASFFGAFAVSGSGNGTS |
| | | | NGTSGSSGGDKTHTCPPCPAPELLGGPSVFLFPPKPK |
| | | | DTLMISRTPEVTCVVVDVSHEDPEVKFNWYVDGVE |
| | | | VHNAKTKPREEQYNSTYRVVSVLTVLHQDWLNGKE |
| | | | YKCKVSNKALPAPIEKTISKAKGQPREPQVYTLPPCR |
| | | | EEMTKNQVSLWCLVKGFYPSDIAVEWESNGQPENN |
| | | | YKTTPPVLDSDGSFFLYSKLTVDKSRWQQGNVFSCS |
| | | | VMHEALHNHYTQKSLSLSPGK |
| SEQ | trimeric_hT | Trimeric | METDTLLLWVLLLWVPGSTGDYKDDDDKGGGGSG |
| ID NO: | RAIL_aa12 | human | TGGAAAHITGTRGRSNTLSSPNSKNEKALGRKINSW |
| 6159 | 2_281- | TRAIL | ESSRSGHSFLSNLHLRNGELVIHEKGFYYIYSQTYFRF |
| | hFc_Knob | comprising | QEEIKENTKNDKQMVQYIYKYTSYPDPILLMKSARN |
| | Cys-Blank | residues | SCWSKDAEYGLYSIYQGGIFELKENDRIFVSVTNEHL |
| | | 122-281 | IDMDHEASFFGAFAVSGAAAHITGTRGRSNTLSSPNS |
| | | | KNEKALGRKINSWESSRSGHSFLSNLHLRNGELVIHE |
| | | | KGFYYIYSQTYFRFQEEIKENTKNDKQMVQYIYKYT |
| | | | SYPDPILLMKSARNSCWSKDAEYGLYSIYQGGIFELK |
| | | | ENDRIFVSVTNEHLIDMDHEASFFGAFAVSGAAAHIT |
| | | | GTRGRSNTLSSPNSKNEKALGRKINSWESSRSGHSFL |
| | | | SNLHLRNGELVIHEKGFYYIYSQTYFRFQEEIKENTK |
| | | | NDKQMVQYIYKYTSYPDPILLMKSARNSCWSKDAE |
| | | | YGLYSIYQGGIFELKENDRIFVSVTNEHLIDMDHEAS |
| | | | FFGAFAVSGSGNGTSNGTSGSSGGDKTHTCPPCPAPE |
| | | | LLGGPSVFLFPPKPKDTLMISRTPEVTCVVVDVSHED |
| | | | PEVKFNWYVDGVEVHNAKTKPREEQYNSTYRVVSV |
| | | | LTVLHQDWLNGKEYKCKVSNKALPAPIEKTISKAKG |
| | | | QPREPQVYTLPPCREEMTKNQVSLWCLVKGFYPSDI |
| | | | AVEWESNGQPENNYKTTPPVLDSDGSFFLYSKLTVD |
| | | | KSRWQQGNVFSCSVMHEALHNHYTQKSLSLSPGK |
| SEQ | monomeric_ | Monomeric | METDTLLLWVLLLWVPGSTGTSEETISTVQEKQQNIS |
| ID NO: | hTRAIL_95 | human | PLVRERGPQRVAAHITGTRGRSNTLSSPNSKNEKALG |
| 6160 | -281- | TRAIL | RKINSWESSRSGHSFLSNLHLRNGELVIHEKGFYYIYS |
| | hFc_Knob | comprising | QTYFRFQEEIKENTKNDKQMVQYIYKYTSYPDPILL |
| | Cys-Blank | residues | MKSARNSCWSKDAEYGLYSIYQGGIFELKENDRIFVS |
| | | 95-281 | VTNEHLIDMDHEASFFGAFLVGGGGGSGGGGSDKT |
| | | | HTCPPCPAPELLGGPSVFLFPPKPKDTLMISRTPEVTC |
| | | | VVVDVSHEDPEVKFNWYVDGVEVHNAKTKPREEQ |
| | | | YNSTYRVVSVLTVLHQDWLNGKEYKCKVSNKALPA |
| | | | PIEKTISKAKGQPREPQVYTLPPCREEMTKNQVSLWC |
| | | | LVKGFYPSDIAVEWESNGQPENNYKTTPPVLDSDGS |
| | | | FFLYSKLTVDKSRWQQGNVFSCSVMHEALHNHYTQ |
| | | | KSLSLSPGK |
| SEQ | dimeric_hT | Dimeric | METDTLLLWVLLLWVPGSTGTSEETISTVQEKQQNIS |
| ID NO: | RAIL_95- | human | PLVRERGPQRVAAHITGTRGRSNTLSSPNSKNEKALG |
| 6161 | 281- | TRAIL | RKINSWESSRSGHSFLSNLHLRNGELVIHEKGFYYIYS |
| | hFc_Knob | comprising | QTYFRFQEEIKENTKNDKQMVQYIYKYTSYPDPILL |
| | Cys-Blank | residues | MKSARNSCWSKDAEYGLYSIYQGGIFELKENDRIFVS |
| | | 95-281 | VTNEHLIDMDHEASFFGAFLVGGGGGSGGGGSGTSE |
| | | | ETISTVQEKQQNISPLVRERGPQRVAAHITGTRGRSN |
| | | | TLSSPNSKNEKALGRKINSWESSRSGHSFLSNLHLRN |
| | | | GELVIHEKGFYYIYSQTYFRFQEEIKENTKNDKQMV |
| | | | QYIYKYTSYPDPILLMKSARNSCWSKDAEYGLYSIY |
| | | | QGGIFELKENDRIFVSVTNEHLIDMDHEASFFGAFLV |
| | | | GGGGGSGGGGSDKTHTCPPCPAPELLGGPSVFLFPPK |
| | | | PKDTLMISRTPEVTCVVVDVSHEDPEVKFNWYVDG |
| | | | VEVHNAKTKPREEQYNSTYRVVSVLTVLHQDWLNG |
| | | | KEYKCKVSNKALPAPIEKTISKAKGQPREPQVYTLPP |
| | | | CREEMTKNQVSLWCLVKGFYPSDIAVEWESNGQPE |
| | | | NNYKTTPPVLDSDGSFFLYSKLTVDKSRWQQGNVFS |
| | | | CSVMHEALHNHYTQKSLSLSPGK |
| SEQ | trimeric_hT | Trimeric | METDTLLLWVLLLWVPGSTGTSEETISTVQEKQQNIS |
| ID NO: | RAIL_95- | human | PLVRERGPQRVAAHITGTRGRSNTLSSPNSKNEKALG |
| 6162 | 281- | TRAIL | RKINSWESSRSGHSFLSNLHLRNGELVIHEKGFYYIYS |
| | hFc_Knob | comprising | QTYFRFQEEIKENTKNDKQMVQYIYKYTSYPDPILL |
| | Cys-Blank | residues | MKSARNSCWSKDAEYGLYSIYQGGIFELKENDRIFVS |
| | | 95-281 | VTNEHLIDMDHEASFFGAFLVGGGGGSGGGGSGTSE |
| | | | ETISTVQEKQQNISPLVRERGPQRVAAHITGTRGRSN |
| | | | TLSSPNSKNEKALGRKINSWESSRSGHSFLSNLHLRN |
| | | | GELVIHEKGFYYIYSQTYFRFQEEIKENTKNDKQMV |
| | | | QYIYKYTSYPDPILLMKSARNSCWSKDAEYGLYSIY |
| | | | QGGIFELKENDRIFVSVTNEHLIDMDHEASFFGAFLV |
| | | | GGGGGSGGGGSGTSEETISTVQEKQQNISPLVRERGP |
| | | | QRVAAHITGTRGRSNTLSSPNSKNEKALGRKINSWES |
| | | | SRSGHSFLSNLHLRNGELVIHEKGFYYIYSQTYFRFQ |
| | | | EEIKENTKNDKQMVQYIYKYTSYPDPILLMKSARNS |
| | | | CWSKDAEYGLYSIYQGGIFELKENDRIFVSVTNEHLI |
| | | | DMDHEASFFGAFLVGGGGGSGGGGSDKTHTCPPCP |
| | | | APELLGGPSVFLFPPKPKDTLMISRTPEVTCVVVDVS |
| | | | HEDPEVKFNWYVDGVEVHNAKTKPREEQYNSTYRV |
| | | | VSVLTVLHQDWLNGKEYKCKVSNKALPAPIEKTISK |
| | | | AKGQPREPQVYTLPPCREEMTKNQVSLWCLVKGFY |
| | | | PSDIAVEWESNGQPENNYKTTPPVLDSDGSFFLYSKL |
| | | | TVDKSRWQQGNVFSCSVMHEALHNHYTQKSLSLSP |
| | | | GK |
| SEQ | a_hDR5_ | Antigen | METDTLLLWVLLLWVPGSTGEVQLVESGGGLVQPG |
| ID NO: | Tigatuzumab | binding | GSLRLSCAASGFTFSSYVMSWVRQAPGKGLEWVATI |
| 6163 | scFv_VH_ | domain | SSGGSYTYYPDSVKGRFTISRDNAKNTLYLQMNSLR |
| | VL- | specific to | AEDTAVYYCARRGDSMITTDYWGQGTLVTVSSGGG |
| | hFc_Knob_ | DR5, a.k.a. | GSGGGGSGGGGSGGGGSDIQMTQSPSSLSASVGDRV |
| | Cys-Blank | tigatuzumab | TITCKASQDVGTAVAWYQQKPGKAPKLLIYWASTR |
| | | | HTGVPSRFSGSGSGTDFTLTISSLQPEDFATYYCQQYS |
| | | | SYRTFGQGTKVEIKGGGGSGGGGSDKTHTCPPCPAP |
| | | | ELLGGPSVFLFPPKPKDTLMISRTPEVTCVVVDVSHE |
| | | | DPEVKFNWYVDGVEVHNAKTKPREEQYNSTYRVVS |
| | | | VLTVLHQDWLNGKEYKCKVSNKALPAPIEKTISKAK |
| | | | GQPREPQVYTLPPCREEMTKNQVSLWCLVKGFYPSD |
| | | | IAVEWESNGQPENNYKTTPPVLDSDGSFFLYSKLTVD |
| | | | KSRWQQGNVFSCSVMHEALHNHYTQKSLSLSPGK |
| SEQ | a_hDR5_ | Antigen | METDTLLLWVLLLWVPGSTGEVQLVQSGGGVERPG |
| ID NO: | Drozitumab_ | binding | GSLRLSCAASGFTFDDYAMSWVRQAPGKGLEWVSG |
| 6164 | scFv_VH_ | domain | INWQGGSTGYADSVKGRVTISRDNAKNSLYLQMNS |
| | VL- | specific to | LRAEDTAVYYCAKILGAGRGWYFDYWGKGTTVTVS |
| | hFc_Knob_ | DR5, a.k.a. | SGGGGSGGGGSGGGGSGGGGSSELTQDPAVSVALG |
| | Cys | drozitumab | QTVRITCSGDSLRSYYASWYQQKPGQAPVLVIYGAN |
| | | | NRPSGIPDRFSGSSSGNTASLTITGAQAEDEADYYCN |
| | | | SADSSGNHVVFGGGTKLTVLGGGGSGGGGSDKTHT |
| | | | CPPCPAPELLGGPSVFLFPPKPKDTLMISRTPEVTCVV |
| | | | VDVSHEDPEVKFNWYVDGVEVHNAKTKPREEQYNS |
| | | | TYRVVSVLTVLHQDWLNGKEYKCKVSNKALPAPIE |
| | | | KTISKAKGQPREPQVYTLPPCREEMTKNQVSLWCLV |
| | | | KGFYPSDIAVEWESNGQPENNYKTTPPVLDSDGSFFL |
| | | | YSKLTVDKSRWQQGNVFSCSVMHEALHNHYTQKSL |
| | | | SLSPGK |
| SEQ | a_hDR5_ | Antigen | METDTLLLWVLLLWVPGSTGQVQLQESGPGLVKPS |
| ID NO: | Conatumumab | binding | QTLSLTCTVSGGSISSGDYFWSWIRQLPGKGLEWIGH |
| 6165 | scFv_VH | domain | IHNSGTTYYNPSLKSRVTISVDTSKKQFSLRLSSVTAA |
| | VL- | specific to | DTAVYYCARDRGGDYYYGMDVWGQGTTVTVSSGG |
| | hFc_Knob_ | DR5, a.k.a. | GGSGGGGSGGGGSGGGGSEIVLTQSPGTLSLSPGERA |
| | Cys | conatumumab | TLSCRASQGISRSYLAWYQQKPGQAPSLLIYGASSRA |
| | | | TGIPDRFSGSGSGTDFTLTISRLEPEDFAVYYCQQFGS |
| | | | SPWTFGQGTKVEIKRGGGGSGGGGSDKTHTCPPCPA |
| | | | PELLGGPSVFLFPPKPKDTLMISRTPEVTCVVVDVSH |
| | | | EDPEVKFNWYVDGVEVHNAKTKPREEQYNSTYRVV |
| | | | SVLTVLHQDWLNGKEYKCKVSNKALPAPIEKTISKA |
| | | | KGQPREPQVYTLPPCREEMTKNQVSLWCLVKGFYPS |
| | | | DIAVEWESNGQPENNYKTTPPVLDSDGSFFLYSKLTV |
| | | | DKSRWQQGNVFSCSVMHEALHNHYTQKSLSLSPGK |
| SEQ | a_hTRBC1_ | Antigen | METDTLLLWVLLLWVPGSTGDVVMTQSPLSLPVTPG |
| ID NO: | Jovil_ | binding | EPASISCRSSQRLVHSNGNTYLHWYLQKPGQSPQLLI |
| 6170 | Hum1_VL- | domain | YRVSNRFPGVPDRFSGSGSGTDFTLKISRVEAEDVGV |
| | hCLIg_vk- | specific to | YFCSQSTHVPYTFGGGTKVEIKRTVAAPSVFIFPPSDE |
| | a_hDR5_Ti | DR5, a.k.a. | QLKSGTASVVCLLNNFYPREAKVQWKVDNALQSGN |
| | gatuzumab | tigatuzumab, | SQESVTEQDSKDSTYSLSSTLTLSKADYEKHKVYAC |
| | scFv_VH_V | with | EVTHQGLSSPVTKSFNRGECGGGGSGGGGSGGGGSE |
| | | anti- | VQLVESGGGLVQPGGSLRLSCAASGFTFSSYVMSWV |
| | | TRBC1 | RQAPGKGLEWVATISSGGSYTYYPDSVKGRFTISRD |
| | | light chain | NAKNTLYLQMNSLRAEDTAVYYCARRGDSMITTDY |
| | | | WGQGTLVTVSSGGGGSGGGGSGGGGSGGGGSDIQM |
| | | | TQSPSSLSASVGDRVTITCKASQDVGTAVAWYQQKP |
| | | | GKAPKLLIYWASTRHTGVPSRFSGSGSGTDFTLTISSL |
| | | | QPEDFATYYCQQYSSYRTFGQGTKVEIK |
| SEQ | a_hTRBC1_ | Antigen | METDTLLLWVLLLWVPGSTGDVVMTQSPLSLPVTPG |
| ID NO: | Jovil_ | binding | EPASISCRSSQRLVHSNGNTYLHWYLQKPGQSPQLLI |
| 6171 | Hum1_VL- | domain | YRVSNRFPGVPDRFSGSGSGTDFTLKISRVEAEDVGV |
| | hCLIg_vk- | specific to | YFCSQSTHVPYTFGGGTKVEIKRTVAAPSVFIFPPSDE |
| | a_hDR5_ | DR5, a.k.a. | QLKSGTASVVCLLNNFYPREAKVQWKVDNALQSGN |
| | Conatumumab | drozitumab, | SQESVTEQDSKDSTYSLSSTLTLSKADYEKHKVYAC |
| | scFv_VH | with anti- | EVTHQGLSSPVTKSFNRGECGGGGSGGGGSGGGGSQ |
| | VL | TRBC1 | VQLQESGPGLVKPSQTLSLTCTVSGGSISSGDYFWSW |
| | | light chain | IRQLPGKGLEWIGHIHNSGTTYYNPSLKSRVTISVDTS |
| | | | KKQFSLRLSSVTAADTAVYYCARDRGGDYYYGMD |
| | | | VWGQGTTVTVSSGGGGSGGGGSGGGGSGGGGSEIV |
| | | | LTQSPGTLSLSPGERATLSCRASQGISRSYLAWYQQK |
| | | | PGQAPSLLIYGASSRATGIPDRFSGSGSGTDFTLTISRL |
| | | | EPEDFAVYYCQQFGSSPWTFGQGTKVEIKR |
| SEQ | a_hTRBC1_ | Antigen | METDTLLLWVLLLWVPGSTGDVVMTQSPLSLPVTPG |
| ID NO: | Jovil_ | binding | EPASISCRSSQRLVHSNGNTYLHWYLQKPGQSPQLLI |
| 6172 | Hum1_VL- | domain | YRVSNRFPGVPDRFSGSGSGTDFTLKISRVEAEDVGV |
| | hCLIg_vk- | specific to | YFCSQSTHVPYTFGGGTKVEIKRTVAAPSVFIFPPSDE |
| | a_hDR5_ | DR5, a.k.a. | QLKSGTASVVCLLNNFYPREAKVQWKVDNALQSGN |
| | Drozitumab_ | conatumumab, | SQESVTEQDSKDSTYSLSSTLTLSKADYEKHKVYAC |
| | scFv_VH_VL | with | EVTHQGLSSPVTKSFNRGECGGGGSGGGGSGGGGSE |
| | | anti- | VQLVQSGGGVERPGGSLRLSCAASGFTFDDYAMSW |
| | | TRBC1 | VRQAPGKGLEWVSGINWQGGSTGYADSVKGRVTIS |
| | | light chain | RDNAKNSLYLQMNSLRAEDTAVYYCAKILGAGRGW |
| | | | YFDYWGKGTTVTVSSGGGGSGGGGSGGGGSGGGGS |
| | | | SELTQDPAVSVALGQTVRITCSGDSLRSYYASWYQQ |
| | | | KPGQAPVLVIYGANNRPSGIPDRFSGSSSGNTASLTIT |
| | | | GAQAEDEADYYCNSADSSGNHVVFGGGTKLTVL |

### T Cell Engagers

[0535] The present disclosure provides, inter alia, multispecific (e.g., bi-, tri-, quad-specific) or multifunctional molecules, that are engineered to contain one or more T cell engager that mediate binding to and/or activation of a T cell. Accordingly, in some embodiments, the T cell engager is selected from an antigen binding domain or ligand that binds to (e.g., and in some embodiments activates) one or more of CD3, TCRα, TCRβ, TCRγ, TCRζ, ICOS, CD28, CD27, HVEM, LIGHT, CD40, 4-4BB, OX40, DR3, GITR, CD30, TIM1, SLAM, CD2, or CD226. In other embodiments, the T cell engager is selected from an antigen binding domain or ligand that binds to and does not activate one or more of CD3, TCRα, TCRβ, TCRγ, TCR ζ, ICOS, CD28, CD27, HVEM, LIGHT, CD40, 4-4BB, OX40, DR3, GITR, CD30, TIM1, SLAM, CD2, or CD226.

### TCR Beta V Antigen Binding Domains

[0536] In some embodiments, the T cell engager is an antigen binding domain (e.g., an antibody molecule or fragment thereof) that binds to (e.g., and in some embodiments activates) TCRs. This disclosure provides, inter alia, antibody molecules and fragments thereof, that bind, e.g., specifically bind, to a human TCR beta V chain (TCRβV), e.g., a TCRβV gene family, e.g., a TCRβV subfamily, e.g., as described herein. TCR beta V families and subfamilies are known in the art, e.g., as described in Yassai et al., (2009) Immunogenetics 61(7) pp: 493-502; Wei S. and Concannon P. (1994) Human Immunology 41(3) pp: 201-206. The antibodies described herein can be recombinant antibodies, e.g., recombinant non-murine antibodies, e.g., recombinant human or humanized antibodies. Throughout this disclosure, TCRβV and TCRBV are used interchangeably.

[0537] In some embodiments, the disclosure provides T cell engagers comprising an anti-TCRβV antibody molecule that binds to human TCRβV, e.g., a TCRβV family, e.g., gene family. In some embodiments a TCRBV gene family comprises one or more subfamilies, e.g., as described herein, e.g., in FIG. 6. In some embodiments, the TCRβV gene family comprises subfamilies comprising: a TCRβ V6 subfamily, a TCRβ V10 subfamily, a TCRβ V12 subfamily, a TCRβ V5 subfamily, a TCRβ V7 subfamily, a TCRβ V11 subfamily, a TCRβ V14 subfamily, a TCRβ V16 subfamily, a TCRβ V18 subfamily, a TCRβ V9 subfamily, a TCRβ V13 subfamily, a TCRβ V4 subfamily, a TCRβ V3 subfamily, a TCRβ V2 subfamily, a TCRβ V15 subfamily, a TCRβ V30 subfamily, a TCRβ V19 subfamily, a TCRβ V27 subfamily, a TCRβ V28 subfamily, a TCRβ V24 subfamily, a TCRβ V20 subfamily, TCRβ V25 subfamily, or a TCRβ V29 subfamily.

[0538] In some embodiments, TCRβ V6 subfamily is also known as TCRβ V13.1. In some embodiments, the TCRβ V6 subfamily comprises: TCRβ V6-4*01, TCRβ V6-4*02, TCRβ V6-9*01, TCRβ V6-8*01, TCRβ V6-5*01, TCRβ V6-6*02, TCRβ V6-6*01, TCRβ V6-2*01, TCRβ V6-3*01 or TCRβ V6-1*01. In some embodiments, TCRβ V6 comprises TCRβ V6-5*01. In some embodiments, TCRβ V6, e.g., TCRβ V6-5*01, is recognized, e.g., bound, by SEQ ID NO: 1 and/or SEQ ID NO: 2. In some embodiments, TCRβ V6, e.g., TCRβ V6-5*01, is recognized, e.g., bound, by SEQ ID NO: 9 and/or SEQ ID NO: 10. In some embodiments, TCRβ V6 is recognized, e.g., bound, by SEQ ID NO: 9 and/or SEQ ID NO: 11.

[0539] In some embodiments, TCRβ V10 subfamily is also known as TCRβ V12. In some embodiments, the TCRβ V10 subfamily comprises: TCRβ V10-1*01, TCRβ V10-1*02, TCRβ V10-3*01 or TCRβ V10-2*01.

[0540] In some embodiments, TCRβ V12 subfamily is also known as TCRβ V8.1. In some embodiments, the TCRβ V12 subfamily comprises: TCRβ V12-4*01, TCRβ V12-3*01, or TCRβ V12-5*01. In some embodiments, TCRβ V12 is recognized, e.g., bound, by SEQ ID NO: 15 and/or SEQ ID NO: 16. In some embodiments, TCRβ V12 is recognized, e.g., bound, by any one of SEQ ID NOs 23-25, and/or any one of SEQ ID NO: 26-30:

[0541] In some embodiments, the TCRβ V5 subfamily is chosen from: TCRβ V5-5*01, TCRβ V5-6*01, TCRβ V5-4*01, TCRβ V5-8*01, TCRβ V5-1*01.

[0542] In some embodiments, the TCRβ V7 subfamily comprises TCRβ V7-7*01, TCRβ V7-6*01, TCRβ V7-8*02, TCRβ V7-4*01, TCRβ V7-2*02, TCRβ V7-2*03, TCRβ V7-2*01, TCRβ V7-3*01, TCRβ V7-9*03, or TCRβ V7-9*01.

[0543] In some embodiments, the TCRβ V11 subfamily comprises: TCRβ V11-1*01, TCRβ V11-2*01 or TCRβ V11-3*01.

[0544] In some embodiments, the TCRβ V14 subfamily comprises TCRβ V14*01.

[0545] In some embodiments, the TCRβ V16 subfamily comprises TCRβ V16*01.

[0546] In some embodiments, the TCRβ V18 subfamily comprises TCRβ V18*01.

[0547] In some embodiments, the TCRβ V9 subfamily comprises TCRβ V9*01 or TCRβ V9*02.

[0548] In some embodiments, the TCRβ V13 subfamily comprises TCRβ V13*01.

[0549] In some embodiments, the TCRβ V4 subfamily comprises TCRβ V4-2*01, TCRβ V4-3*01, or TCRβ V4-1*01.

[0550] In some embodiments, the TCRβ V3 subfamily comprises TCRβ V3-1*01.

[0551] In some embodiments, the TCRβ V2 subfamily comprises TCRβ V2*01.

[0552] In some embodiments, the TCRβ V15 subfamily comprises TCRβ V15*01.

[0553] In some embodiments, the TCRβ V30 subfamily comprises TCRβ V30*01, or TCRβ V30*02.

[0554] In some embodiments, the TCRβ V19 subfamily comprises TCRβ V19*01, or TCRβ V19*02.

[0555] In some embodiments, the TCRβ V27 subfamily comprises TCRβ V27*01.

[0556] In some embodiments, the TCRβ V28 subfamily comprises TCRβ V28*01.

[0557] In some embodiments, the TCRβ V24 subfamily comprises TCRβ V24-1*01.

[0558] In some embodiments, the TCRβ V20 subfamily comprises TCRβ V20-1*01, or TCRβ V20-1*02.

[0559] In some embodiments, the TCRβ V25 subfamily comprises TCRβ V25-1*01.

[0560] In some embodiments, the TCRβ V29 subfamily comprises TCRβ V29-1*01.

TABLE 12
List of TCRβV subfamilies and subfamily members

| Reference | | |
|---|---|---|
| in FIG. 6 | Subfamily | Subfamily members |
| A | TCRβ V6 | TCRβ V6-4*01, TCRβ V6-4*02, TCRβ V6-9*01, |
| | Also referred to as: | TCRβ V6-8*01, TCRβ V6-5*01, TCRβ V6-6*02, |
| | TCR VB 13.1 | TCRβ V6-6*01, TCRβ V6-2*01, TCRβ V6-3*01 or |
| | | TCRβ V6-1*01. |
| B | TCRβ V10 | TCRβ V10-1*01, TCRβ V10-1*02, TCRβ V10- |
| | Also referred to as: | 3*01 or TCRβ V10-2*01 |
| | TCRβ V12 | |
| C | TCRβ V12 | TCRβ V12-4*01, TCRβ V12-3*01, or TCRβ V12- |
| | Also referred to as: | 5*01 |
| | TCRβ V8.1 | |
| D | TCRβ V5 | TCRβ V5-5*01, TCRβ V5-6*01, TCRβ V5-4*01, |
| | | TCRβ V5-8*01, TCRβ V5-1*01 |
| E | TCRβ V7 | TCRβ V7-7*01, TCRβ V7-6*01, TCRβ V7 -8*02, |
| | | TCRβ V7 -4*01, TCRβ V7-2*02, TCRβ V7-2*03, |
| | | TCRβ V7-2*01, TCRβ V7-3*01, TCRβ V7-9*03, or |
| | | TCRβ V7-9*01 |
| F | TCRβ V11 | TCRβ V11-1*01, TCRβ V11-2*01 or TCRβ V11- |
| | | 3*01 |
| G | TCRβ V14 | TCRβ V14*01 |
| H | TCRβ V16 | TCRβ V16*01 |
| I | TCRβ V18 | TCRβ V18*01 |
| J | TCRβ V9 | TCRβ V9*01 or TCRβ V9*02 |
| K | TCRβ V13 | TCRβ V13*01 |
| L | TCRβ V4 | TCRβ V4-2*01, TCRβ V4-3*01, or TCRβ V4-1*01 |
| M | TCRβ V3 | TCRβ V3-1*01 |
| N | TCRβ V2 | TCRβ V2*01 |
| O | TCRβ V15 | TCRβ V15*01 |
| P | TCRβ V30 | TCRβ V30*01, or TCRβ V30*02 |
| Q | TCRβ V19 | TCRβ V19*01, or TCRβ V19*02 |
| R | TCRβ V27 | TCRβ V27*01. |
| S | TCRβ V28 | TCRβ V28*01. |
| T | TCRβ V24 | TCRβ V24-1*01 |
| U | TCRβ V20 | TCRβ V20-1*01, or TCRβ V20-1*02 |
| V | TCRβ V25 | TCRβ V25-1*01 |
| W | TCRβ V29 | TCRβ V29-1*01 |

### Anti-TCRβV Antibodies

[0561] In an aspect, the disclosure provides an anti-TCRβV antibody molecule that binds to human TCRβV, e.g., a TCRβV gene family, e.g., one or more of a TCRβV subfamily, e.g., as described herein, e.g., in FIG. 6. In some embodiments, the anti-TCRβV antibody molecule binds to one or more TCRβV subfamilies chosen from: a TCRβ V6 subfamily, a TCRβ V10 subfamily, a TCRβ V12 subfamily, a TCRβ V5 subfamily, a TCRβ V7 subfamily, a TCRβ V11 subfamily, a TCRβ V14 subfamily, a TCRβ V16 subfamily, a TCRβ V18 subfamily, a TCRβ V9 subfamily, a TCRβ V13 subfamily, a TCRβ V4 subfamily, a TCRβ V3 subfamily, a TCRβ V2 subfamily, a TCRβ V15 subfamily, a TCRβ V30 subfamily, a TCRβ V19 subfamily, a TCRβ V27 subfamily, a TCRβ V28 subfamily, a TCRβ V24 subfamily, a TCRβ V20 subfamily, TCRβ V25 subfamily, or a TCRβ V29 subfamily. In some embodiments, the anti-TCRβV antibody molecule binds to a TCRβ V6 subfamily comprising: TCRβ V6-4*01, TCRβ V6-4*02, TCRβ V6-9*01, TCRβ V6-8*01, TCRβ V6-5*01, TCRβ V6-6*02, TCRβ V6-6*01, TCRβ V6-2*01, TCRβ V6-3*01 or TCRβ V6-1*01. In some embodiments the TCRβ V6 subfamily comprises TCRβ V6-5*01. In some embodiments, the anti-TCRβV antibody molecule binds to a TCRβ V10 subfamily comprising: TCRβ V10-1*01, TCRβ V10-1*02, TCRβ V10-3*01 or TCRβ V10-2*01. In some embodiments, the anti-TCRβV antibody molecule binds to a TCRβ V12 subfamily comprising: TCRβ V12-4*01, TCRβ V12-3*01 or TCRβ V12-5*01. In some embodiments, the anti-TCRβV antibody molecule binds to a TCRβ V5 subfamily comprising: TCRβ V5-5*01, TCRβ V5-6*01, TCRβ V5-4*01, TCRβ V5-8*01, TCRβ V5-1*01.

[0562] In some embodiments, the anti-TCRβV antibody molecule does not bind to TCRβ V12, or binds to TCRβ V12 with an affinity and/or binding specificity that is less than (e.g., less than about 10%, 20%, 30%, 40%, 50%, 60%, 70%, 80%, 90% or about 2-, 5-, or 10-fold) the affinity and/or binding specificity of the 16G8 murine antibody or a humanized version thereof as described in U.S. Pat. No. 5,861,155.

[0563] In some embodiments, the anti-TCRβV antibody molecule binds to TCRβ V12 with an affinity and/or binding specificity that is greater than (e.g., greater than about 10%, 20%, 30%, 40%, 50%, 60%, 70%, 80%, 90% or about 2-, 5-, or 10-fold) the affinity and/or binding specificity of the 16G8 murine antibody or a humanized version thereof as described in U.S. Pat. No. 5,861,155.

[0564] In some embodiments, the anti-TCRβV antibody molecule binds to a TCRβV region other than TCRβ V12 (e.g., TCRβV region as described herein, e.g., TCRβ V6 subfamily (e.g., TCRβ V6-5*01) with an affinity and/or binding specificity that is greater than (e.g., greater than about 10%, 20%, 30%, 40%, 50%, 60%, 70%, 80%, 90% or about 2-, 5-, or 10-fold) the affinity and/or binding specificity of the 16G8 murine antibody or a humanized version thereof as described in U.S. Pat. No. 5,861,155.

[0565] In some embodiments, the anti-TCRβV antibody molecule does not bind to TCRβ V5-5*01 or TCRβ V5-1*01, or binds to TCRβ V5-5*01 or TCRβ V5-1*01 with an affinity and/or binding specificity that is less than (e.g., less than about 10%, 20%, 30%, 40%, 50%, 60%, 70%, 80%, 90% or about 2-, 5-, or 10-fold) the affinity and/or binding specificity of the TM23 murine antibody or a humanized version thereof as described in U.S. Pat. No. 5,861,155.

[0566] In some embodiments, the anti-TCRβV antibody molecule binds to TCRβ V5-5*01 or TCRβ V5-1*01 with an affinity and/or binding specificity that is greater than (e.g., greater than about 10%, 20%, 30%, 40%, 50%, 60%, 70%, 80%, 90% or about 2-, 5-, or 10-fold) the affinity and/or binding specificity of the TM23 murine antibody or a humanized version thereof as described in U.S. Pat. No. 5,861,155.

[0567] In some embodiments, the anti-TCRβV antibody molecule binds to a TCRβV region other than TCRβ V5-5*01 or TCRβ V5-1*01 (e.g., TCRβV region as described herein, e.g., TCRβ V6 subfamily (e.g., TCRβ V6-5*01) with an affinity and/or binding specificity that is greater than (e.g., greater than about 10%, 20%, 30%, 40%, 50%, 60%, 70%, 80%, 90% or about 2-, 5-, or 10-fold) the affinity and/or binding specificity of the TM23 murine antibody or a humanized version thereof as described in U.S. Pat. No. 5,861,155.

### Anti-TCRβ V6 Antibodies

[0568] Accordingly, in one aspect, the disclosure provides an anti-TCRβV antibody molecule that binds to human TCRβ V6, e.g., a TCRβ V6 subfamily comprising: TCRβ V6-4*01, TCRβ V6-4*02, TCRβ V6-9*01, TCRβ V6-8*01, TCRβ V6-5*01, TCRβ V6-6*02, TCRβ V6-6*01, TCRβ V6-2*01, TCRβ V6-3*01 or TCRβ V6-1*01. In some embodiments the TCRβ V6 subfamily comprises TCRβ V6-5*01.

[0569] In some embodiments, TCRβ V6-5*01 is encoded by the nucleic acid sequence of SEQ ID NO: 43, or a sequence having 85%, 90%, 95%, 99% or more identity thereof.

SEQ ID NO: 43
ATGAGCATCGGCCTCCTGTGCTGTGCAGCCTTGTCTCTCCTGTGG
GCAGGTCCAGTGAATGCTGGTGTCACTCAGACCCCAAAATTCCAG
GTCCTGAAGACAGGACAGAGCATGACACTGCAGTGTGCCCAGGAT
ATGAACCATGAATACATGTCCTGGTATCGACAAGACCCAGGCATG
GGGCTGAGGCTGATTCATTACTCAGTTGGTGCTGGTATCACTGAC
CAAGGAGAAGTCCCCAATGGCTACAATGTCTCCAGATCAACCACA
GAGGATTTCCCGCTCAGGCTGCTGTCGGCTGCTCCCTCCCAGACA
TCTGTGTACTTCTGTGCCAGCAGTTACTC

[0570] In some embodiments, TCRβ V6-5*01 comprises the amino acid sequence of SEQ ID NO: 44, or an amino acid sequence having 85%, 90%, 95%, 99% or more identity thereof.

SEQ ID NO: 44
MSIGLLCCAALSLLWAGPVNAGVTQTPKFQVLKTGQSMTLQCAQD
MNHEYMSWYRQDPGMGLRLIHYSVGAGITDQGEVPNGYNVSRSTT
EDFPLRLLSAAPSQTSVYFCASSY

[0571] In some embodiments, the anti-TCRβV antibody molecule, e.g., anti-TCRβ V6 (e.g., anti-TCRβ V6-5*01) antibody molecule, is a non-murine antibody molecule, e.g., a human or humanized antibody molecule. In some embodiments, the anti-TCRβV antibody molecule, e.g., anti-TCRβ V6 (e.g., anti-TCRβ V6-5*01) antibody molecule is a human antibody molecule. In some embodiments, the anti-TCRβV antibody molecule, e.g., anti-TCRβ V6 (e.g., anti-TCRβ V6-5*01) antibody molecule is a humanized antibody molecule.

[0572] In some embodiments, the anti-TCRβV antibody molecule, e.g., anti-TCRβ V6 (e.g., anti-TCRβ V6-5*01) antibody molecule, is isolated or recombinant.

[0573] In some embodiments, the anti-TCRβV antibody molecule, e.g., anti-TCRβ V6 (e.g., anti-TCRβ V6-5*01) antibody molecule, comprises at least one antigen-binding region, e.g., a variable region or an antigen-binding fragment thereof, from an antibody described herein, e.g., an antibody chosen from BHM1709 or BHM1710, or as described in Table 13, or encoded by the nucleotide sequence in Table 13, or a sequence substantially identical (e.g., at least 80%, 85%, 90%, 92%, 95%, 97%, 98%, 99% or higher identical) to any of the aforesaid sequences.

[0574] In some embodiments, the anti-TCRβV antibody molecule, e.g., anti-TCRβ V6 (e.g., anti-TCRβ V6-5*01) antibody molecule, comprises at least one, two, three or four variable regions from an antibody described herein, e.g., an antibody chosen from BHM1709 or BHM1710, or as described in Table 13, or encoded by the nucleotide sequence in Table 13, or a sequence substantially identical (e.g., at least 80%, 85%, 90%, 92%, 95%, 97%, 98%, 99% or higher identical) to any of the aforesaid sequences.

[0575] In some embodiments, the anti-TCRβV antibody molecule, e.g., anti-TCRβ V6 (e.g., anti-TCRβ V6-5*01) antibody molecule, comprises at least one or two heavy chain variable regions from an antibody described herein, e.g., an antibody chosen from BHM1709 or BHM1710, or as described in Table 13, or encoded by the nucleotide sequence in Table 13, or a sequence substantially identical (e.g., at least 80%, 85%, 90%, 92%, 95%, 97%, 98%, 99% or higher identical) to any of the aforesaid sequences.

[0576] In some embodiments, the anti-TCRβV antibody molecule, e.g., anti-TCRβ V6 (e.g., anti-TCRβ V6-5*01) antibody molecule, comprises at least one or two light chain variable regions from an antibody described herein, e.g., an antibody chosen from BHM1709 or BHM1710, or as described in Table 13, or encoded by the nucleotide sequence in Table 13, or a sequence substantially identical (e.g., at least 80%, 85%, 90%, 92%, 95%, 97%, 98%, 99% or higher identical) to any of the aforesaid sequences.

[0577] In some embodiments, the anti-TCRβV antibody molecule, e.g., anti-TCRβ V6 (e.g., anti-TCRβ V6-5*01) antibody molecule, comprises a heavy chain constant region for an IgG4, e.g., a human IgG4. In still another embodiment, the anti-TCRβV antibody molecule, e.g., anti-TCRβ V6 (e.g., anti-TCRβ V6-5*01) antibody molecule includes a heavy chain constant region for an IgG1, e.g., a human IgG1. In one embodiment, the heavy chain constant region comprises an amino sequence set forth in Table 17, or a sequence substantially identical (e.g., at least 80%, 85%, 90%, 92%, 95%, 97%, 98%, 99% or higher identical) thereto.

[0578] In some embodiments, the anti-TCRβV antibody molecule, e.g., anti-TCRβ V6 (e.g., anti-TCRβ V6-5*01) antibody molecule, includes a kappa light chain constant region, e.g., a human kappa light chain constant region. In one embodiment, the light chain constant region comprises an amino sequence set forth in Table 17, or a sequence substantially identical (e.g., at least 80%, 85%, 90%, 92%, 95%, 97%, 98%, 99% or higher identical) thereto.

[0579] In some embodiments, the anti-TCRβV antibody molecule, e.g., anti-TCRβ V6 (e.g., anti-TCRβ V6-5*01) antibody molecule, includes at least one, two, or three complementarity determining regions (CDRs) from a heavy chain variable region of an antibody described herein, e.g., an antibody chosen from BHM1709 or BHM1710, or as described in Table 13, or encoded by the nucleotide sequence in Table 13, or a sequence substantially identical (e.g., at least 80%, 85%, 90%, 92%, 95%, 97%, 98%, 99% or higher identical) to any of the aforesaid sequences.

[0580] In some embodiments, the anti-TCRβV antibody molecule, e.g., anti-TCRβ V6 (e.g., anti-TCRβ V6-5*01) antibody molecule, includes at least one, two, or three CDRs (or collectively all of the CDRs) from a heavy chain variable region comprising an amino acid sequence shown in Table 13, or encoded by a nucleotide sequence shown in Table 13. In one embodiment, one or more of the CDRs (or collectively all of the CDRs) have one, two, three, four, five, six or more changes, e.g., amino acid substitutions or deletions, relative to the amino acid sequence shown in Table 13, or encoded by a nucleotide sequence shown in Table 13.

[0581] In some embodiments, the anti-TCRβV antibody molecule, e.g., anti-TCRβ V6 (e.g., anti-TCRβ V6-5*01) antibody molecule, includes at least one, two, or three complementarity determining regions (CDRs) from a light chain variable region of an antibody described herein, e.g., an antibody chosen from BHM1709 or BHM1710, or as described in Table 13, or encoded by the nucleotide sequence in Table 13, or a sequence substantially identical (e.g., at least 80%, 85%, 90%, 92%, 95%, 97%, 98%, 99% or higher identical) to any of the aforesaid sequences.

[0582] In some embodiments, the anti-TCRβV antibody molecule, e.g., anti-TCRβ V6 (e.g., anti-TCRβ V6-5*01) antibody molecule, includes at least one, two, or three CDRs (or collectively all of the CDRs) from a light chain variable region comprising an amino acid sequence shown in Table 13, or encoded by a nucleotide sequence shown in Table 13. In one embodiment, one or more of the CDRs (or collectively all of the CDRs) have one, two, three, four, five, six or more changes, e.g., amino acid substitutions or deletions, relative to the amino acid sequence shown in Table 13, or encoded by a nucleotide sequence shown in Table 13.

[0583] In some embodiments, the anti-TCRβV antibody molecule, e.g., anti-TCRβ V6 (e.g., anti-TCRβ V6-5*01) antibody molecule, includes at least one, two, three, four, five or six CDRs (or collectively all of the CDRs) from a heavy and light chain variable region comprising an amino acid sequence shown in Table 13, or encoded by a nucleotide sequence shown in Table 13. In one embodiment, one or more of the CDRs (or collectively all of the CDRs) have one, two, three, four, five, six or more changes, e.g., amino acid substitutions or deletions, relative to the amino acid sequence shown in Table 13, or encoded by a nucleotide sequence shown in Table 13.

[0584] In some embodiments, the anti-TCRβV antibody molecule, e.g., anti-TCRβ V6 (e.g., anti-TCRβ V6-5*01) antibody molecule, molecule includes all six CDRs from an antibody described herein, e.g., an antibody chosen from BHM1709 or BHM1710, or as described in Table 13, or encoded by the nucleotide sequence in Table 13, or closely related CDRs, e.g., CDRs which are identical or which have at least one amino acid alteration, but not more than two, three or four alterations (e.g., substitutions, deletions, or insertions, e.g., conservative substitutions). In some embodiments, the anti-TCRβV antibody molecule, e.g., anti-TCRβ V6 (e.g., anti-TCRβ V6-5*01) antibody molecule, may include any CDR described herein.

[0585] In some embodiments, the anti-TCRβV antibody molecule, e.g., anti-TCRβ V6 (e.g., anti-TCRβ V6-5*01) antibody molecule includes at least one, two, or three CDRs according to Kabat et al. (e.g., at least one, two, or three CDRs according to the Kabat definition as set out in Table 13) from a heavy chain variable region of an antibody described herein, e.g., an antibody chosen from BHM1709 or BHM1710, or as described in Table 13, or a sequence substantially identical (e.g., at least 80%, 85%, 90%, 92%, 95%, 97%, 98%, 99% or higher identical) to any of the aforesaid sequences; or which have at least one amino acid alteration, but not more than two, three or four alterations (e.g., substitutions, deletions, or insertions, e.g., conservative substitutions) relative to one, two, or three CDRs according to Kabat et al. shown in Table 13.

[0586] In some embodiments, the anti-TCRβV antibody molecule, e.g., anti-TCRβ V6 (e.g., anti-TCRβ V6-5*01) antibody molecule includes at least one, two, or three CDRs according to Kabat et al. (e.g., at least one, two, or three CDRs according to the Kabat definition as set out in Table 13) from a light chain variable region of an antibody described herein, e.g., an antibody chosen from BHM1709 or BHM1710, or as described in Table 13, or a sequence substantially identical (e.g., at least 80%, 85%, 90%, 92%, 95%, 97%, 98%, 99% or higher identical) to any of the aforesaid sequences; or which have at least one amino acid alteration, but not more than two, three or four alterations (e.g., substitutions, deletions, or insertions, e.g., conservative substitutions) relative to one, two, or three CDRs according to Kabat et al. shown in Table 13.

[0587] In some embodiments, the anti-TCRβV antibody molecule, e.g., anti-TCRβ V6 (e.g., anti-TCRβ V6-5*01) antibody molecule, includes at least one, two, three, four, five, or six CDRs according to Kabat et al. (e.g., at least one, two, three, four, five, or six CDRs according to the Kabat definition as set out in Table 13) from the heavy and light chain variable regions of an antibody described herein, e.g., an antibody chosen from BHM1709 or BHM1710, or as described in Table 13, or encoded by the nucleotide sequence in Table 13; or a sequence substantially identical (e.g., at least 80%, 85%, 90%, 92%, 95%, 97%, 98%, 99% or higher identical) to any of the aforesaid sequences; or which have at least one amino acid alteration, but not more than two, three or four alterations (e.g., substitutions, deletions, or insertions, e.g., conservative substitutions) relative to one, two, three, four, five, or six CDRs according to Kabat et al. shown in Table 13.

[0588] In some embodiments, the anti-TCRβV antibody molecule, e.g., anti-TCRβ V6 (e.g., anti-TCRβ V6-5*01) antibody molecule, includes all six CDRs according to Kabat et al. (e.g., all six CDRs according to the Kabat definition as set out in Table 13) from the heavy and light chain variable regions of an antibody described herein, e.g., an antibody chosen from BHM1709 or BHM1710, or as described in Table 13, or encoded by the nucleotide sequence in Table 13; or encoded by the nucleotide sequence in Table 13; or a sequence substantially identical (e.g., at least 80%, 85%, 90%, 92%, 95%, 97%, 98%, 99% or higher identical) to any of the aforesaid sequences; or which have at least one amino acid alteration, but not more than two, three or four alterations (e.g., substitutions, deletions, or insertions, e.g., conservative substitutions) relative to all six CDRs according to Kabat et al. shown in Table 13. In one embodiment, the anti-TCRβV antibody molecule, e.g., anti-TCRβ V6 (e.g., anti-TCRβ V6-5*01) antibody molecule, may include any CDR described herein.

[0589] In some embodiments, the anti-TCRβV antibody molecule, e.g., anti-TCRβ V6 (e.g., anti-TCRβ V6-5*01) antibody molecule, includes at least one, two, or three hypervariable loops that have the same canonical structures as the corresponding hypervariable loop of an antibody described herein, e.g., an antibody chosen from chosen from BHM1709 or BHM1710 e.g., the same canonical structures as at least loop 1 and/or loop 2 of the heavy and/or light chain variable domains of an antibody described herein. See, e.g., Chothia et al., (1992) J. Mol. Biol. 227:799-817; Tomlinson et al., (1992) J. Mol. Biol. 227:776-798 for descriptions of hypervariable loop canonical structures. These structures can be determined by inspection of the tables described in these references.

[0590] In some embodiments, the anti-TCRβV antibody molecule, e.g., anti-TCRβ V6 (e.g., anti-TCRβ V6-5*01) antibody molecule includes at least one, two, or three CDRs according to Chothia et al. (e.g., at least one, two, or three CDRs according to the Chothia definition as set out in Table 13) from a heavy chain variable region of an antibody described herein, e.g., an antibody chosen from BHM1709 or BHM1710, or as described in Table 13, or a sequence substantially identical (e.g., at least 80%, 85%, 90%, 92%, 95%, 97%, 98%, 99% or higher identical) to any of the aforesaid sequences; or which have at least one amino acid alteration, but not more than two, three or four alterations (e.g., substitutions, deletions, or insertions, e.g., conservative substitutions) relative to one, two, or three CDRs according to Chothia et al. shown in Table 13.

[0591] In some embodiments, the anti-TCRβV antibody molecule, e.g., anti-TCRβ V6 (e.g., anti-TCRβ V6-5*01) antibody molecule includes at least one, two, or three CDRs according to Chothia et al. (e.g., at least one, two, or three CDRs according to the Chothia definition as set out in Table 13) from a light chain variable region of an antibody described herein, e.g., an antibody chosen from BHM1709 or BHM1710, or as described in Table 13, or a sequence substantially identical (e.g., at least 80%, 85%, 90%, 92%, 95%, 97%, 98%, 99% or higher identical) to any of the aforesaid sequences; or which have at least one amino acid alteration, but not more than two, three or four alterations (e.g., substitutions, deletions, or insertions, e.g., conservative substitutions) relative to one, two, or three CDRs according to Chothia et al. shown in Table 13.

[0592] In some embodiments, the anti-TCRβV antibody molecule, e.g., anti-TCRβ V6 (e.g., anti-TCRβ V6-5*01) antibody molecule, includes at least one, two, three, four, five, or six CDRs according to Chothia et al. (e.g., at least one, two, three, four, five, or six CDRs according to the Chothia definition as set out in Table 13) from the heavy and light chain variable regions of an antibody described herein, e.g., an antibody chosen from BHM1709 or BHM1710, or as described in Table 13, or encoded by the nucleotide sequence in Table 13; or a sequence substantially identical (e.g., at least 80%, 85%, 90%, 92%, 95%, 97%, 98%, 99% or higher identical) to any of the aforesaid sequences; or which have at least one amino acid alteration, but not more than two, three or four alterations (e.g., substitutions, deletions, or insertions, e.g., conservative substitutions) relative to one, two, three, four, five, or six CDRs according to Chothia et al. shown in Table 13.

[0593] In some embodiments, the anti-TCRβV antibody molecule, e.g., anti-TCRβ V6 (e.g., anti-TCRβ V6-5*01) antibody molecule, includes all six CDRs according to Chothia et al. (e.g., all six CDRs according to the Chothia definition as set out in Table 13) from the heavy and light chain variable regions of an antibody described herein, e.g., an antibody chosen from BHM1709 or BHM1710, or as described in Table 13, or encoded by the nucleotide sequence in Table 13; or encoded by the nucleotide sequence in Table 13; or a sequence substantially identical (e.g., at least 80%, 85%, 90%, 92%, 95%, 97%, 98%, 99% or higher identical) to any of the aforesaid sequences; or which have at least one amino acid alteration, but not more than two, three or four alterations (e.g., substitutions, deletions, or insertions, e.g., conservative substitutions) relative to all six CDRs according to Chothia et al. shown in Table 13. In one embodiment, the anti-TCRβV antibody molecule, e.g., anti-TCRβ V6 (e.g., anti-TCRβ V6-5*01) antibody molecule, may include any CDR described herein.

[0594] In some embodiments, the anti-TCRβV antibody molecule, e.g., anti-TCRβ V6 (e.g., anti-TCRβ V6-5*01) antibody molecule, molecule includes a combination of CDRs or hypervariable loops defined according to Kabat et al., Chothia et al., or as described in Table 13.

[0595] In some embodiments, the anti-TCRβV antibody molecule, e.g., anti-TCRβ V6 (e.g., anti-TCRβ V6-5*01) antibody molecule, can contain any combination of CDRs or hypervariable loops according to the Kabat and Chothia definitions.

[0596] In some embodiments, a combined CDR as set out in Table 13 is a CDR that comprises a Kabat CDR and a Chothia CDR.

[0597] In some embodiments, the anti-TCRβV antibody molecule, e.g., anti-TCRβ V6 (e.g., anti-TCRβ V6-5*01) antibody molecule, molecule includes a combination of CDRs or hypervariable loops identified as combined CDRs in Table 13. In some embodiments, the anti-TCRβV antibody molecule, e.g., anti-TCRβ V6 (e.g., anti-TCRβ V6-5*01) antibody molecule, can contain any combination of CDRs or hypervariable loops according the “combined” CDRs are described in Table 13.

[0598] In an embodiment, e.g., an embodiment comprising a variable region, a CDR (e.g., a combined CDR, Chothia CDR or Kabat CDR), or other sequence referred to herein, e.g., in Table 13, the antibody molecule is a monospecific antibody molecule, a bispecific antibody molecule, a bivalent antibody molecule, a biparatopic antibody molecule, or an antibody molecule that comprises an antigen binding fragment of an antibody, e.g., a half antibody or antigen binding fragment of a half antibody. In certain embodiments the antibody molecule comprise a multispecific molecule, e.g., a bispecific molecule, e.g., as described herein.

[0599] In an embodiment, the anti-TCRβV antibody molecule, e.g., anti-TCRβ V6 (e.g., anti-TCRβ V6-5*01) antibody molecule includes:
[0600] (i) one, two or all of a light chain complementarity determining region 1 (LC CDR1), a light chain complementarity determining region 2 (LC CDR2), and a light chain complementarity determining region 3 (LC CDR3) of SEQ ID NO: 2, SEQ ID NO: 10 or SEQ ID NO: 11, and/or
[0601] (ii) one, two or all of a heavy chain complementarity determining region 1 (HC CDR1), heavy chain complementarity determining region 2 (HC CDR2), and a heavy chain complementarity determining region 3 (HC CDR3) of SEQ ID NO: 1 or SEQ ID NO: 9.

[0602] In some embodiments, the anti-TCRβV antibody molecule, e.g., anti-TCRβ V6 (e.g., anti-TCRβ V6-5*01) antibody molecule comprises a LC CDR1, LC CDR2, and LC CDR3 of SEQ ID NO: 2, and a HC CDR1, HC CDR2, and HC CDR3 of SEQ ID NO: 1.

[0603] In some embodiments the anti-TCRβV antibody molecule, e.g., anti-TCRβ V6 (e.g., anti-TCRβ V6-5*01) antibody molecule comprises a LC CDR1, LC CDR2, and LC CDR3 of SEQ ID NO: 10, and a HC CDR1, HC CDR2, and HC CDR3 of SEQ ID NO: 9.

[0604] In some embodiments, the anti-TCR PV antibody molecule, e.g., anti-TCRβ V6 (e.g., anti-TCRβ V6-5*01) antibody molecule comprises a LC CDR1, LC CDR2, and LC CDR3 of SEQ ID NO: 11, and a HC CDR1, HC CDR2, and HC CDR3 of SEQ ID NO: 9.

[0605] In an embodiment, the anti-TCRβV antibody molecule, e.g., anti-TCRβ V6 (e.g., anti-TCRβ V6-5*01) antibody molecule comprises:
[0606] (i) a LC CDR1 amino acid sequence of SEQ ID NO: 6, a LC CDR2 amino acid sequence of SEQ ID NO: 7, or a LC CDR3 amino acid sequence of SEQ ID NO: 8; and/or
[0607] (ii) a HC CDR1 amino acid sequence of SEQ ID NO: 3, a HC CDR2 amino acid sequence of SEQ ID NO: 4, or a HC CDR3 amino acid sequence of SEQ ID NO: 5.

[0608] In some embodiments, the anti-TCRβV antibody molecule, e.g., anti-TCRβ V6 (e.g., anti-TCRβ V6-5*01) antibody molecule comprises:
[0609] (i) a light chain variable region (VL) comprising a LC CDR1 amino acid sequence of SEQ ID NO: 6, a LC CDR2 amino acid sequence of SEQ ID NO: 7, or a LC CDR3 amino acid sequence of SEQ ID NO: 8; and/or
[0610] (ii) a heavy chain variable region (VH) comprising a HC CDR1 amino acid sequence of SEQ ID NO: 3, a HC CDR2 amino acid sequence of SEQ ID NO: 4, or a HC CDR3 amino acid sequence of SEQ ID NO: 5.

[0611] In an embodiment, the anti-TCRβV antibody molecule, e.g., anti-TCRβ V6 (e.g., anti-TCRβ V6-5*01) antibody molecule comprises:
[0612] (i) a LC CDR1 amino acid sequence of SEQ ID NO: 51, a LC CDR2 amino acid sequence of SEQ ID NO: 52, or a LC CDR3 amino acid sequence of SEQ ID NO: 53; and/or
[0613] (ii) a HC CDR1 amino acid sequence of SEQ ID NO: 45, a HC CDR2 amino acid sequence of SEQ ID NO: 46, or a HC CDR3 amino acid sequence of SEQ ID NO: 47.

[0614] In some embodiments, the anti-TCRβV antibody molecule, e.g., anti-TCRβ V6 (e.g., anti-TCRβ V6-5*01) antibody molecule comprises:
[0615] (i) a light chain variable region (VL) comprising a LC CDR1 amino acid sequence of SEQ ID NO: 51, a LC CDR2 amino acid sequence of SEQ ID NO: 52, or a LC CDR3 amino acid sequence of SEQ ID NO: 53; and/or
[0616] (ii) a heavy chain variable region (VH) comprising a HC CDR1 amino acid sequence of SEQ ID NO: 45, a HC CDR2 amino acid sequence of SEQ ID NO: 46, or a HC CDR3 amino acid sequence of SEQ ID NO: 47.

[0617] In an embodiment, the anti-TCRβV antibody molecule, e.g., anti-TCRβ V6 (e.g., anti-TCRβ V6-5*01) antibody molecule comprises:
[0618] (i) a LC CDR1 amino acid sequence of SEQ ID NO: 54, a LC CDR2 amino acid sequence of SEQ ID NO: 55, or a LC CDR3 amino acid sequence of SEQ ID NO: 56; and/or
[0619] (ii) a HC CDR1 amino acid sequence of SEQ ID NO: 48, a HC CDR2 amino acid sequence of SEQ ID NO: 49, or a HC CDR3 amino acid sequence of SEQ ID NO: 50.

[0620] In some embodiments, the anti-TCRβV antibody molecule, e.g., anti-TCRβ V6 (e.g., anti-TCRβ V6-5*01) antibody molecule comprises:
[0621] (i) a light chain variable region (VL) comprising a LC CDR1 amino acid sequence of SEQ ID NO: 54, a LC CDR2 amino acid sequence of SEQ ID NO: 55, or a LC CDR3 amino acid sequence of SEQ ID NO: 56; and/or
[0622] (ii) a heavy chain variable region (VH) comprising a HC CDR1 amino acid sequence of SEQ ID NO: 48, a HC CDR2 amino acid sequence of SEQ ID NO: 49, or a HC CDR3 amino acid sequence of SEQ ID NO: 50.

[0623] In one embodiment, the light or the heavy chain variable framework (e.g., the region encompassing at least FR1, FR2, FR3, and optionally FR4) of the anti-TCRβV antibody molecule, e.g., anti-TCRβ V6 (e.g., anti-TCRβ V6-5*01) antibody molecule can be chosen from: (a) a light or heavy chain variable framework including at least 80%, 85%, 87% 90%, 92%, 93%, 95%, 97%, 98%, or 100% of the amino acid residues from a human light or heavy chain variable framework, e.g., a light or heavy chain variable framework residue from a human mature antibody, a human germline sequence, or a human consensus sequence; (b) a light or heavy chain variable framework including from 20% to 80%, 40% to 60%, 60% to 90%, or 70% to 95% of the amino acid residues from a human light or heavy chain variable framework, e.g., a light or heavy chain variable framework residue from a human mature antibody, a human germline sequence, or a human consensus sequence; (c) a non-human framework (e.g., a rodent framework); or (d) a non-human framework that has been modified, e.g., to remove antigenic or cytotoxic determinants, e.g., deimmunized, or partially humanized. In one embodiment, the light or heavy chain variable framework region (particularly FR1, FR2 and/or FR3) includes a light or heavy chain variable framework sequence at least 70, 75, 80, 85, 87, 88, 90, 92, 94, 95, 96, 97, 98, 99% identical or identical to the frameworks of a VL or VH segment of a human germline gene.

[0624] In some embodiments, the anti-TCRβV antibody molecule, e.g., anti-TCRβ V6 (e.g., anti-TCRβ V6-5*01) antibody molecule, comprises a heavy chain variable domain having at least one, two, three, four, five, six, seven, ten, fifteen, twenty or more changes, e.g., amino acid substitutions or deletions, from an amino acid sequence of BHM1709 or BHM1710. g., the amino acid sequence of the FR region in the entire variable region, e.g., shown in FIG. 4A, or in SEQ ID NO: 9.

[0625] Alternatively, or in combination with the heavy chain substitutions described herein, the anti-TCRβV antibody molecule, e.g., anti-TCRβ V6 (e.g., anti-TCRβ V6-5*01) antibody molecule, comprises a light chain variable domain having at least one, two, three, four, five, six, seven, ten, fifteen, twenty or more amino acid changes, e.g., amino acid substitutions or deletions, from an amino acid sequence of BHM1709 or BHM1710. e.g., the amino acid sequence of the FR region in the entire variable region, e.g., shown in FIG. 4B, or in SEQ ID NO: 10 or SEQ ID NO: 11.

[0626] In some embodiments, the anti-TCRβV antibody molecule, e.g., anti-TCRβ V6 (e.g., anti-TCRβ V6-5*01) antibody molecule, includes one, two, three, or four heavy chain framework regions shown in FIG. 4A, or a sequence substantially identical thereto.

[0627] In some embodiments, the anti-TCRβV antibody molecule, e.g., anti-TCRβ V6 (e.g., anti-TCRβ V6-5*01) antibody molecule, includes one, two, three, or four light chain framework regions shown in FIG. 4B, or a sequence substantially identical thereto.

[0628] In some embodiments, the anti-TCRβV antibody molecule, e.g., anti-TCRβ V6 (e.g., anti-TCRβ V6-5*01) antibody molecule, comprises the light chain framework region 1 of BHM1709 or BHM1710, e.g., as shown in FIG. 4B.

[0629] In some embodiments, the anti-TCRβV antibody molecule, e.g., anti-TCRβ V6 (e.g., anti-TCRβ V6-5*01) antibody molecule, comprises the light chain framework region 2 of BHM1709 or BHM1710, e.g., as shown in FIG. 4B.

[0630] In some embodiments, the anti-TCRβV antibody molecule, e.g., anti-TCRβ V6 (e.g., anti-TCRβ V6-5*01) antibody molecule, comprises the light chain framework region 3 of BHM1709 or BHM1710, e.g., as shown in FIG. 4B.

[0631] In some embodiments, the anti-TCRβV antibody molecule, e.g., anti-TCRβ V6 (e.g., anti-TCRβ V6-5*01) antibody molecule, comprises the light chain framework region 4 of BHM1709 or BHM1710, e.g., as shown in FIG. 4B.

[0632] In some embodiments, the anti-TCRβV antibody molecule, e.g., anti-TCRβ V6 (e.g., anti-TCRβ V6-5*01) antibody molecule, comprises a light chain variable domain comprising a framework region, e.g., framework region 1 (FR1), comprising a change, e.g., a substitution (e.g., a conservative substitution) at position 10 according to Kabat numbering. In some embodiments, the FR1 comprises a Phenylalanine at position 10, e.g., a Serine to Phenyalanine substitution. In some embodiments, the substitution is relative to a human germline light chain framework region sequence.

[0633] In some embodiments, the anti-TCRβV antibody molecule, e.g., anti-TCRβ V6 (e.g., anti-TCRβ V6-5*01) antibody molecule, comprises a light chain variable domain comprising a framework region, e.g., framework region 2 (FR2), comprising a change, e.g., a substitution (e.g., a conservative substitution) at a position disclosed herein according to Kabat numbering. In some embodiments, FR2 comprises a Histidine at position 36, e.g., a substitution at position 36 according to Kabat numbering, e.g., a Tyrosine to Histidine substitution. In some embodiments, FR2 comprises an Alanine at position 46, e.g., a substitution at position 46 according to Kabat numbering, e.g., a Arginine to Alanine substitution. In some embodiments, the substitution is relative to a human germline light chain framework region sequence.

[0634] In some embodiments, the anti-TCRβV antibody molecule, e.g., anti-TCRβ V6 (e.g., anti-TCRβ V6-5*01) antibody molecule, comprises a light chain variable domain comprising a framework region, e.g., framework region 3 (FR3), comprising a change, e.g., a substitution (e.g., a conservative substitution) at a position disclosed herein according to Kabat numbering. In some embodiments, FR3 comprises a Phenyalanine at position 87, e.g., a substitution at position 87 according to Kabat numbering, e.g., a Tyrosine to Phenyalanine substitution. In some embodiments, the substitution is relative to a human germline light chain framework region sequence.

[0635] In some embodiments, the anti-TCRβV antibody molecule, e.g., anti-TCRβ V6 (e.g., anti-TCRβ V6-5*01) antibody molecule, comprises a light chain variable domain comprising: (a) a framework region 1 (FR1) comprising a Phenylalanine at position 10, e.g., a substitution at position 10 according to Kabat numbering, e.g., a Serine to Phenyalanine substitution; (b) a framework region 2 (FR2) comprising a Histidine at position 36, e.g., a substitution at position 36 according to Kabat numbering, e.g., a Tyrosine to Histidine substitution, and a Alanine at position 46, e.g., a substitution at position 46 according to Kabat numbering, e.g., a Arginine to Alanine substitution; and (c) a framework region 3 (FR3) comprising a Phenylalanine at position 87, e.g., a substitution at position 87 according to Kabat numbering, e.g., a Tyrosine to Phenyalanine substitution, e.g., as shown in the amino acid sequence of SEQ ID NO: 10. In some embodiments, the substitution is relative to a human germline light chain framework region sequence.

[0636] In some embodiments, the anti-TCRβV antibody molecule, e.g., anti-TCRβ V6 (e.g., anti-TCRβ V6-5*01) antibody molecule, comprises a light chain variable domain comprising: (a) a framework region 2 (FR2) comprising a Histidine at position 36, e.g., a substitution at position 36 according to Kabat numbering, e.g., a Tyrosine to Histidine substitution, and a Alanine at position 46, e.g., a substitution at position 46 according to Kabat numbering, e.g., a Arginine to Alanine substitution; and (b) a framework region 3 (FR3) comprising a Phenylalanine at position 87, e.g., a substitution at position 87 according to Kabat numbering, e.g., a Tyrosine to Phenyalanine substitution, e.g., as shown in the amino acid sequence of SEQ ID NO: 11. In some embodiments, the substitution is relative to a human germline light chain framework region sequence.

[0637] In some embodiments, the anti-TCRβV antibody molecule, e.g., anti-TCRβ V6 (e.g., anti-TCRβ V6-5*01) antibody molecule, comprises a light chain variable domain comprising: (a) a framework region 1 (FR1) comprising a change, e.g., a substitution (e.g., a conservative substitution) at one or more (e.g., all) positions disclosed herein according to Kabat numbering, ; (b) a framework region 2 (FR2) comprising a change, e.g., a substitution (e.g., a conservative substitution) at one or more (e.g., all) position disclosed herein according to Kabat numbering and (c) a framework region 3 (FR3) comprising a change, e.g., a substitution (e.g., a conservative substitution) at one or more (e.g., all) position disclosed herein according to Kabat numbering. In some embodiments, the substitution is relative to a human germline light chain framework region sequence.

[0638] In some embodiments, the anti-TCRβV antibody molecule, e.g., anti-TCRβ V6 (e.g., anti-TCRβ V6-5*01) antibody molecule, comprises the heavy chain framework region 1 of BHM1709 or BHM1710, e.g., as shown in FIG. 4A.

[0639] In some embodiments, the anti-TCRβV antibody molecule, e.g., anti-TCRβ V6 (e.g., anti-TCRβ V6-5*01) antibody molecule, comprises the heavy chain framework region 2 of BHM1709 or BHM1710, e.g., as shown in FIG. 4A

[0640] In some embodiments, the anti-TCRβV antibody molecule, e.g., anti-TCRβ V6 (e.g., anti-TCRβ V6-5*01) antibody molecule, comprises the heavy chain framework region 3 of BHM1709 or BHM1710, e.g., as shown in FIG. 4A.

[0641] In some embodiments, the anti-TCRβV antibody molecule, e.g., anti-TCRβ V6 (e.g., anti-TCRβ V6-5*01) antibody molecule, comprises the heavy chain framework region 4 of BHM1709 or BHM1710, e.g., as shown in FIG. 4A.

[0642] In some embodiments, the anti-TCRβV antibody molecule, e.g., anti-TCRβ V6 (e.g., anti-TCRβ V6-5*01) antibody molecule, comprises a heavy chain variable domain comprising a framework region, e.g., framework region 3 (FR3), comprising a change, e.g., a substitution (e.g., a conservative substitution) at a position disclosed herein according to Kabat numbering. In some embodiments, FR3 comprises a Threonine at position 73, e.g., a substitution at position 73 according to Kabat numbering, e.g., a Glutamic Acid to Threonine substitution. In some embodiments, FR3 comprises a Glycine at position 94, e.g., a substitution at position 94 according to Kabat numbering, e.g., a Arginine to Glycine substitution. In some embodiments, the substitution is relative to a human germline heavy chain framework region sequence.

[0643] In some embodiments, the anti-TCRβV antibody molecule, e.g., anti-TCRβ V6 (e.g., anti-TCRβ V6-5*01) antibody molecule, comprises a heavy chain variable domain comprising a framework region 3 (FR3) comprising a Threonine at position 73, e.g., a substitution at position 73 according to Kabat numbering, e.g., a Glutamic Acid to Threonine substitution, and a Glycine at position 94, e.g., a substitution at position 94 according to Kabat numbering, e.g., a Arginine to Glycine substitution, e.g., as shown in the amino acid sequence of SEQ ID NO: 10.

[0644] In some embodiments, the anti-TCRβV antibody molecule, e.g., anti-TCRβ V6 (e.g., anti-TCRβ V6-5*01) antibody molecule, comprises the heavy chain framework regions 1-4 of BHM1709 or BHM1710, e.g., SEQ ID NO: 9, or as shown in FIGS. 4A and 4B.

[0645] In some embodiments, the anti-TCRβV antibody molecule, e.g., anti-TCRβ V6 (e.g., anti-TCRβ V6-5*01) antibody molecule, comprises the light chain framework regions 1-4 of BHM1709, e.g., SEQ ID NO: 10, or as shown in FIGS. 4A and 4B.

[0646] In some embodiments, the anti-TCRβV antibody molecule, e.g., anti-TCRβ V6 (e.g., anti-TCRβ V6-5*01) antibody molecule, comprises the light chain framework regions 1-4 of BHM1710, e.g., SEQ ID NO: 11, or as shown in FIGS. 4A and 4B.

[0647] In some embodiments, the anti-TCRβV antibody molecule, e.g., anti-TCRβ V6 (e.g., anti-TCRβ V6-5*01) antibody molecule, comprises the heavy chain framework regions 1-4 of BHM1709, e.g., SEQ ID NO: 9; and the light chain framework regions 1-4 of BHM1709, e.g., SEQ ID NO: 10, or as shown in FIGS. 4A and 4B.

[0648] In some embodiments, the anti-TCRβV antibody molecule, e.g., anti-TCRβ V6 (e.g., anti-TCRβ V6-5*01) antibody molecule, comprises the heavy chain framework regions 1-4 of BHM1710, e.g., SEQ ID NO: 9; and the light chain framework regions 1-4 of BHM1710, e.g., SEQ ID NO: 11, or as shown in FIGS. 4A and 4B.

[0649] In some embodiments, the heavy or light chain variable domain, or both, of the anti-TCRβV antibody molecule, e.g., anti-TCRβ V6 (e.g., anti-TCRβ V6-5*01) antibody molecule, includes an amino acid sequence, which is substantially identical to an amino acid disclosed herein, e.g., at least 80%, 85%, 90%, 92%, 95%, 97%, 98%, 99% or higher identical to a variable region of an antibody described herein, e.g., an antibody chosen from BHM1709 or BHM1710, or as described in Table 13, or encoded by the nucleotide sequence in Table 13; or which differs at least 1 or 5 residues, but less than 40, 30, 20, or 10 residues, from a variable region of an antibody described herein.

[0650] In some embodiments, the anti-TCRβV antibody molecule, e.g., anti-TCRβ V6 (e.g., anti-TCRβ V6-5*01) antibody molecule, comprises at least one, two, three, or four antigen-binding regions, e.g., variable regions, having an amino acid sequence as set forth in Table 13, or a sequence substantially identical thereto (e.g., a sequence at least about 85%, 90%, 95%, 99% or more identical thereto, or which differs by no more than 1, 2, 5, 10, or 15 amino acid residues from the sequences shown in Table 13. In another embodiment, the anti-TCRβV antibody molecule, e.g., anti-TCRβ V6 (e.g., anti-TCRβ V6-5*01) antibody molecule includes a VH and/or VL domain encoded by a nucleic acid having a nucleotide sequence as set forth in Table 13, or a sequence substantially identical thereto (e.g., a sequence at least about 85%, 90%, 95%, 99% or more identical thereto, or which differs by no more than 3, 6, 15, 30, or 45 nucleotides from the sequences shown in Table 13.

[0651] In some embodiments, the anti-TCRβV antibody molecule, e.g., anti-TCRβ V6 (e.g., anti-TCRβ V6-5*01) antibody molecule, comprises:
[0652] a VH domain comprising the amino acid sequence of SEQ ID NO: 9, an amino acid sequence at least about 85%, 90%, 95%, 99% or more identical to the amino acid sequence of SEQ ID NO: 9, or an amino acid sequence which differs by no more than 1, 2, 5, 10, or 15 amino acid residues from the amino acid sequence of SEQ ID NO: 9; and/or
[0653] a VL domain comprising the amino acid sequence of SEQ ID NO: 10, an amino acid sequence at least about 85%, 90%, 95%, 99% or more identical to the amino acid sequence of SEQ ID NO: 10, or an amino acid sequence which differs by no more than 1, 2, 5, 10, or 15 amino acid residues from the amino acid sequence of SEQ ID NO: 10.

[0654] In some embodiments, the anti-TCRβV antibody molecule, e.g., anti-TCRβ V6 (e.g., anti-TCRβV6-5*01) antibody molecule, comprises:
[0655] a VH domain comprising the amino acid sequence of SEQ ID NO: 9, an amino acid sequence at least about 85%, 90%, 95%, 99% or more identical to the amino acid sequence of SEQ ID NO: 9, or an amino acid sequence which differs by no more than 1, 2, 5, 10, or 15 amino acid residues from the amino acid sequence of SEQ ID NO: 9; and/or
[0656] a VL domain comprising the amino acid sequence of SEQ ID NO: 11, an amino acid sequence at least about 85%, 90%, 95%, 99% or more identical to the amino acid sequence of SEQ ID NO: 11, or an amino acid sequence which differs by no more than 1, 2, 5, 10, or 15 amino acid residues from the amino acid sequence of SEQ ID NO: 11.

[0657] In some embodiments, the anti-TCRβV antibody molecule, e.g., anti-TCRβ V6 (e.g., anti-TCRβ V6-5*01) antibody molecule is a full antibody or fragment thereof (e.g., a Fab, F(ab′)₂, Fv, or a single chain Fv fragment (scFv)). In embodiments, the anti-TCRβV antibody molecule, e.g., anti-TCRβ V6 (e.g., anti-TCRβ V6-5*01) antibody molecule is a monoclonal antibody or an antibody with single specificity. In some embodiments, the anti-TCRβV antibody molecule, e.g., anti-TCRβ V6 (e.g., anti-TCRβ V6-5*01) antibody molecule, can also be a humanized, chimeric, camelid, shark, or an in vitro-generated antibody molecule. In some embodiments, the anti-TCRβV antibody molecule, e.g., anti-TCRβ V6 (e.g., anti-TCRβ V6-5*01) antibody molecule, is a humanized antibody molecule. The heavy and light chains of the anti-TCRβV antibody molecule, e.g., anti-TCRβ V6 (e.g., anti-TCRβ V6-5*01) antibody molecule, can be full-length (e.g., an antibody can include at least one, and preferably two, complete heavy chains, and at least one, and preferably two, complete light chains) or can include an antigen-binding fragment (e.g., a Fab, F(ab′)2, Fv, a single chain Fv fragment, a single domain antibody, a diabody (dAb), a bivalent antibody, or bispecific antibody or fragment thereof, a single domain variant thereof, or a camelid antibody).

[0658] In some embodiments, the anti-TCRβV antibody molecule, e.g., anti-TCRβ V6 (e.g., anti-TCRβ V6-5*01) antibody molecule, is in the form of a multispecific molecule, e.g., a bispecific molecule, e.g., as described herein.

[0659] In some embodiments, the anti-TCRβV antibody molecule, e.g., anti-TCRβ V6 (e.g., anti-TCRβ V6-5*01) antibody molecule, has a heavy chain constant region (Fc) chosen from, e.g., the heavy chain constant regions of IgG1, IgG2, IgG3, IgG4, IgM, IgA1, IgA2, IgD, and IgE. In some embodiments, the Fc region is chosen from the heavy chain constant regions of IgG1, IgG2, IgG3, and IgG4. In some embodiments, the Fc region is chosen from the heavy chain constant region of IgG1 or IgG2 (e.g., human IgG1, or IgG2). In some embodiments, the heavy chain constant region is human IgG1.

[0660] In some embodiments, the anti-TCRβV antibody molecule, e.g., anti-TCRβ V6 (e.g., anti-TCRβ V6-5*01) antibody molecule, has a light chain constant region chosen from, e.g., the light chain constant regions of kappa or lambda, preferably kappa (e.g., human kappa). In one embodiment, the constant region is altered, e.g., mutated, to modify the properties of the anti-TCRβV antibody molecule, e.g., anti-TCRβ V6 (e.g., anti-TCRβ V6-5*01) antibody molecule (e.g., to increase or decrease one or more of: Fc receptor binding, antibody glycosylation, the number of cysteine residues, effector cell function, or complement function). For example, the constant region is mutated at positions 296 (M to Y), 298 (S to T), 300 (T to E), 477 (H to K) and 478 (N to F) to alter Fc receptor binding (e.g., the mutated positions correspond to positions 132 (M to Y), 134 (S to T), 136 (T to E), 313 (H to K) and 314 (N to F) of SEQ ID NOs: 212 or 214; or positions 135 (M to Y), 137 (S to T), 139 (T to E), 316 (H to K) and 317 (N to F) of SEQ ID NOs: 215, 216, 217 or 218), e.g., relative to human IgG1.

TABLE 13
Amino acid and nucleotide sequences for murine, chimeric and humanized antibody
molecules. The antibody molecules include murine mAb H131, and humanized mAb H131 Clones
BHM1709 and BHM1710. The amino acid the heavy and light chain CDRs, and the amino acid and
nucleotide sequences of the heavy and light chain variable regions, and the heavy
and light chains are shown.
H131 (murine)

| | | |
|---|---|---|
| SEQ ID NO: 3 | HC CDR1 (Combined) | GYSFTTYYIH |
| SEQ ID NO: 4 | HC CDR2 (Combined) | WFFPGSGNIKYNEKFKG |
| SEQ ID NO: 5 | HC CDR3 (Combined) | SYYSYDVLDY |
| SEQ ID NO: 45 | HC CDR1 (Kabat) | TYYIH |
| SEQ ID NO: 46 | HC CDR2 (Kabat) | WFFPGSGNIKYNEKFKG |
| SEQ ID NO: 47 | HC CDR3 (Kabat) | SYYSYDVLDY |
| SEQ ID NO:48 | HC CDR1 (Chothia) | GYSFTTY |
| SEQ ID NO: 49 | HC CDR2 (Chothia) | FPGSGN |
| SEQ ID NO: 50 | HC CDR3 (Chothia) | SYYSYDVLDY |
| SEQ ID NO: 1 | VH | QVQLQQSGPELVKPGTSVKISCKASGYSFTTYY |
| | | IHWVKQRPGQGLEWIGWFFPGSGNIKYNEKFK |
| | | GKATLTADTSSSTAYMQLSSLTSEESAVYFCAG |
| | | SYYSYDVLDYWGHGTTLTVSS |
| SEQ ID NO: 6 | LC CDR1 (Combined) | KASQNVGINVV |
| SEQ ID NO: 7 | LC CDR2 (Combined)) | SSSHRYS |
| SEQ ID NO: 8 | LC CDR3 (Combined) | QQFKSYPLT |
| SEQ ID NO: 51 | LC CDR1 (Kabat) | KASQNVGINVV |
| SEQ ID NO: 52 | LC CDR2 (Kabat) | SSSHRYS |
| SEQ ID NO: 53 | LC CDR3 (Kabat) | QQFKSYPLT |
| SEQ ID NO: 54 | LC CDR1 (Chothia) | KASQNVGINVV |
| SEQ ID NO: 55 | LC CDR2 (chothia) | SSSHRYS |
| SEQ ID NO: 56 | LC CDR3 (chothia) | QQFKSYPLT |
| SEQ ID NO: 2 | VL | DILMTQSQKFMSTSLGDRVSVSCKASQNVGIN |
| | | VVWHQQKPGQSPKALIYSSSHRYSGVPDRFTG |
| | | SGSGTDFTLTINNVQSEDLAEYFCQQFKSYPLTF |
| | | GAGTKLELK |

BHM1709 (humanized)

| | | |
|---|---|---|
| SEQ ID NO: 3 | HC CDR1 (Combined) | GYSFTTYYIH |
| SEQ ID NO: 4 | HC CDR2 (Combined) | WFFPGSGNIKYNEKFKG |
| SEQ ID NO: 5 | HC CDR3 (Combined) | SYYSYDVLDY |
| SEQ ID NO: 9 | VH | QVQLVQSGAEVKKPGSSVKVSCKASGYSFTTY |
| | | YIHWVRQAPGQGLEWMGWFFPGSGNIKYNEK |
| | | FKGRVTITADTSTSTAYMELSSLRSEDTAVYYC |
| | | AGSYYSYDVLDYWGQGTTVTVSS |
| SEQ ID NO: 12 | DNA VH | CAGGTGCAGCTGGTTCAGTCTGGCGCCGAAG |
| | | TGAAGAAACCTGGCTCCTCCGTGAAGGTGTC |
| | | CTGCAAGGCTTCCGGCTACTCCTTCACCACCT |
| | | ACTACATCCACTGGGTCCGACAGGCCCCTGG |
| | | ACAAGGATTGGAATGGATGGGCTGGTTCTTC |
| | | CCCGGCTCCGGCAACATCAAGTACAACGAGA |
| | | AGTTCAAGGGCCGCGTGACCATCACCGCCGA |
| | | CACCTCTACCTCTACCGCCTACATGGAACTGT |
| | | CCAGCCTGAGATCTGAGGACACCGCCGTGTA |
| | | CTACTGCGCCGGCTCCTACTACTCTTACGACG |
| | | TGCTGGATTACTGGGGCCAGGGCACCACAGT |
| | | GACAGTGTCCTCT |
| SEQ ID NO: 6 | LC CDR1 (Combined) | KASQNVGINVV |
| SEQ ID NO: 7 | LC CDR2 (Combined)) | SSSHRYS |
| SEQ ID NO: 8 | LC CDR3 (Combined) | QQFKSYPLT |
| SEQ ID NO: 10 | VL | DIQMTQSPSFLSASVGDRVTITCKASQNVGINV |
| | | VWHQQKPGKAPKALIYSSSHRYSGVPSRFSGS |
| | | GSGTEFTLTISSLQPEDFATYFCQQFKSYPLTFG |
| | | QGTKLEIK |
| SEQ ID NO: 13 | DNA VL | GACATCCAGATGACCCAGTCTCCATCCTTCCT |
| | | GTCCGCCTCTGTGGGCGACAGAGTGACCATC |
| | | ACATGCAAGGCCTCTCAGAACGTGGGCATCA |
| | | ACGTCGTGTGGCACCAGCAGAAGCCTGGCAA |
| | | GGCTCCTAAGGCTCTGATCTACTCCTCCAGCC |
| | | ACCGGTACTCTGGCGTGCCCTCTAGATTTTCC |
| | | GGCTCTGGCTCTGGCACCGAGTTTACCCTGAC |
| | | AATCTCCAGCCTGCAGCCTGAGGACTTCGCC |
| | | ACCTACTTTTGCCAGCAGTTCAAGAGCTACCC |
| | | TCTGACCTTTGGCCAGGGCACCAAGCTGGAA |
| | | ATCAAG |

BHM1710 (humanized)

| | | |
|---|---|---|
| SEQ ID NO: 3 | HC CDR1 (Combined) | GYSFTTYYIH |
| SEQ ID NO: 4 | HC CDR2 (Combined) | WFFPGSGNIKYNEKFKG |
| SEQ ID NO: 5 | HC CDR3 (Combined) | SYYSYDVLDY |
| SEQ ID NO: 9 | VH | QVQLVQSGAEVKKPGSSVKVSCKASGYSFTTY |
| | | YIHWVRQAPGQGLEWMGWFFPGSGNIKYNEK |
| | | FKGRVTITADTSTSTAYMELSSLRSEDTAVYYC |
| | | AGSYYSYDVLDYWGQGTTVTVSS |
| SEQ ID NO: 12 | DNA VH | CAGGTGCAGCTGGTTCAGTCTGGCGCCGAAG |
| | | TGAAGAAACCTGGCTCCTCCGTGAAGGTGTC |
| | | CTGCAAGGCTTCCGGCTACTCCTTCACCACCT |
| | | ACTACATCCACTGGGTCCGACAGGCCCCTGG |
| | | ACAAGGATTGGAATGGATGGGCTGGTTCTTC |
| | | CCCGGCTCCGGCAACATCAAGTACAACGAGA |
| | | AGTTCAAGGGCCGCGTGACCATCACCGCCGA |
| | | CACCTCTACCTCTACCGCCTACATGGAACTGT |
| | | CCAGCCTGAGATCTGAGGACACCGCCGTGTA |
| | | CTACTGCGCCGGCTCCTACTACTCTTACGACG |
| | | TGCTGGATTACTGGGGCCAGGGCACCACAGT |
| | | GACAGTGTCCTCT |
| SEQ ID NO: 6 | LC CDR1 (Combined) | KASQNVGINVV |
| SEQ ID NO: 7 | LC CDR2 (Combined)) | SSSHRYS |
| SEQ ID NO: 8 | LC CDR3 (Combined) | QQFKSYPLT |
| SEQ ID NO: 11 | VL | DIQMTQSPSSLSASVGDRVTITCKASQNVGINV |
| | | VWHQQKPGKVPKALIYSSSHRYSGVPSRFSGS |
| | | GSGTDFTLTISSLQPEDVATYFCQQFKSYPLTFG |
| | | QGTKLEIK |
| SEQ ID NO: 14 | DNA VL | GACATCCAGATGACCCAGTCTCCATCCTCTCT |
| | | GTCCGCCTCTGTGGGCGACAGAGTGACCATC |
| | | ACATGCAAGGCCTCTCAGAACGTGGGCATCA |
| | | ACGTCGTGTGGCACCAGCAGAAACCTGGCAA |
| | | GGTGCCCAAGGCTCTGATCTACTCCTCCAGCC |
| | | ACAGATACTCCGGCGTGCCCTCTAGATTCTCC |
| | | GGCTCTGGCTCTGGCACCGACTTTACCCTGAC |
| | | AATCTCCAGCCTGCAGCCTGAGGACGTGGCC |
| | | ACCTACTTTTGCCAGCAGTTCAAGAGCTACCC |
| | | TCTGACCTTTGGCCAGGGCACCAAGCTGGAA |
| | | ATCAAG |

### Anti-TCRβ V12 Antibodies

[0661] Accordingly, in one aspect, the disclosure provides an anti-TCRβV antibody molecule that binds to human TCRβ V12, e.g., a TCRβ V12 subfamily comprising: TCRβ V12-4*01, TCRβ V12-3*01 or TCRβ V12-5*01. In some embodiments the TCRβ V12 subfamily comprises TCRβ V12-4*01. In some embodiments the TCRβ V12 subfamily comprises TCRβ V12-3*01.

[0662] In some embodiments, the anti-TCRβV antibody molecule, e.g., anti-TCRβ V12 antibody molecule, is a non-murine antibody molecule, e.g., a human or humanized antibody molecule. In some embodiments, the anti-TCRβV antibody molecule, e.g., anti-TCRβ V12 antibody molecule is a human antibody molecule. In some embodiments, the anti-TCRβV antibody molecule, e.g., anti-TCRβ V12 antibody molecule is a humanized antibody molecule.

[0663] In some embodiments, the anti-TCRβV antibody molecule, e.g., anti-TCRβ V12 antibody molecule, is isolated or recombinant.

[0664] In some embodiments, the anti-TCRβV antibody molecule, e.g., anti-TCRβ V12 antibody molecule, comprises at least one antigen-binding region, e.g., a variable region or an antigen-binding fragment thereof, from an antibody described herein, e.g., an antibody described in Table 14, or encoded by the nucleotide sequence in Table 14, or a sequence substantially identical (e.g., at least 80%, 85%, 90%, 92%, 95%, 97%, 98%, 99% or higher identical) to any of the aforesaid sequences.

[0665] In some embodiments, the anti-TCRβV antibody molecule, e.g., anti-TCRβ V12 antibody molecule, comprises at least one, two, three or four variable regions from an antibody described herein, e.g., an antibody as described in Table 14, or encoded by the nucleotide sequence in Table 14, or a sequence substantially identical (e.g., at least 80%, 85%, 90%, 92%, 95%, 97%, 98%, 99% or higher identical) to any of the aforesaid sequences.

[0666] In some embodiments, the anti-TCRβV antibody molecule, e.g., anti-TCRβ V12 antibody molecule, comprises at least one or two heavy chain variable regions from an antibody described herein, e.g., an antibody as described in Table 14, or encoded by the nucleotide sequence in Table 14, or a sequence substantially identical (e.g., at least 80%, 85%, 90%, 92%, 95%, 97%, 98%, 99% or higher identical) to any of the aforesaid sequences.

[0667] In some embodiments, the anti-TCRβV antibody molecule, e.g., anti-TCRβ V12 antibody molecule, comprises at least one or two light chain variable regions from an antibody described herein, e.g., an antibody as described in Table 14, or encoded by the nucleotide sequence in Table 14, or a sequence substantially identical (e.g., at least 80%, 85%, 90%, 92%, 95%, 97%, 98%, 99% or higher identical) to any of the aforesaid sequences.

[0668] In some embodiments, the anti-TCRβV antibody molecule, e.g., anti-TCRβ V12 antibody molecule, comprises a heavy chain constant region for an IgG4, e.g., a human IgG4. In still another embodiment, the anti-TCRβV antibody molecule, e.g., anti-TCRβ V12 antibody molecule, includes a heavy chain constant region for an IgG1, e.g., a human IgG1. In one embodiment, the heavy chain constant region comprises an amino sequence set forth in Table 17, or a sequence substantially identical (e.g., at least 80%, 85%, 90%, 92%, 95%, 97%, 98%, 99% or higher identical) thereto.

[0669] In some embodiments, the anti-TCRβV antibody molecule, e.g., anti-TCRβ V12 antibody molecule, includes a kappa light chain constant region, e.g., a human kappa light chain constant region. In one embodiment, the light chain constant region comprises an amino sequence set forth in Table 17, or a sequence substantially identical (e.g., at least 80%, 85%, 90%, 92%, 95%, 97%, 98%, 99% or higher identical) thereto.

[0670] In some embodiments, the anti-TCRβV antibody molecule, e.g., anti-TCRβ V12 antibody molecule, includes at least one, two, or three complementarity determining regions (CDRs) from a heavy chain variable region of an antibody described herein, e.g., an antibody as described in Table 14, or encoded by the nucleotide sequence in Table 14, or a sequence substantially identical (e.g., at least 80%, 85%, 90%, 92%, 95%, 97%, 98%, 99% or higher identical) to any of the aforesaid sequences.

[0671] In some embodiments, the anti-TCRβV antibody molecule, e.g., anti-TCRβ V12 antibody molecule, includes at least one, two, or three CDRs (or collectively all of the CDRs) from a heavy chain variable region comprising an amino acid sequence shown in Table 14, or encoded by a nucleotide sequence shown in Table 14. In one embodiment, one or more of the CDRs (or collectively all of the CDRs) have one, two, three, four, five, six or more changes, e.g., amino acid substitutions or deletions, relative to the amino acid sequence shown in Table 14, or encoded by a nucleotide sequence shown in Table 14.

[0672] In some embodiments, the anti-TCRβV antibody molecule, e.g., anti-TCRβ V12 antibody molecule, includes at least one, two, or three complementarity determining regions (CDRs) from a light chain variable region of an antibody described herein, e.g., an antibody as described in Table 14, or encoded by the nucleotide sequence in Table 14, or a sequence substantially identical (e.g., at least 80%, 85%, 90%, 92%, 95%, 97%, 98%, 99% or higher identical) to any of the aforesaid sequences.

[0673] In some embodiments, the anti-TCRβV antibody molecule, e.g., anti-TCRβ V12 antibody molecule, includes at least one, two, or three CDRs (or collectively all of the CDRs) from a light chain variable region comprising an amino acid sequence shown in Table 14, or encoded by a nucleotide sequence shown in Table 14. In one embodiment, one or more of the CDRs (or collectively all of the CDRs) have one, two, three, four, five, six or more changes, e.g., amino acid substitutions or deletions, relative to the amino acid sequence shown in Table 14, or encoded by a nucleotide sequence shown in Table 14.

[0674] In some embodiments, the anti-TCRβV antibody molecule, e.g., anti-TCRβ V12 antibody molecule, includes at least one, two, three, four, five or six CDRs (or collectively all of the CDRs) from a heavy and light chain variable region comprising an amino acid sequence shown in Table 14, or encoded by a nucleotide sequence shown in Table 14. In one embodiment, one or more of the CDRs (or collectively all of the CDRs) have one, two, three, four, five, six or more changes, e.g., amino acid substitutions or deletions, relative to the amino acid sequence shown in Table 14, or encoded by a nucleotide sequence shown in Table 14.

[0675] In some embodiments, the anti-TCRβV antibody molecule, e.g., anti-TCRβ V12 antibody molecule, molecule includes all six CDRs from an antibody described herein, e.g., an antibody as described in Table 14, or encoded by the nucleotide sequence in Table 14, or closely related CDRs, e.g., CDRs which are identical or which have at least one amino acid alteration, but not more than two, three or four alterations (e.g., substitutions, deletions, or insertions, e.g., conservative substitutions). In some embodiments, the anti-TCRβV antibody molecule, e.g., anti-TCRβ V12 antibody molecule, may include any CDR described herein.

[0676] In some embodiments, the anti-TCRβV antibody molecule, e.g., anti-TCRβ V12 antibody molecule includes at least one, two, or three CDRs according to Kabat et al. (e.g., at least one, two, or three CDRs according to the Kabat definition as set out in Table 14) from a heavy chain variable region of an antibody described herein, e.g., an antibody chosen as described in Table 14, or a sequence substantially identical (e.g., at least 80%, 85%, 90%, 92%, 95%, 97%, 98%, 99% or higher identical) to any of the aforesaid sequences; or which have at least one amino acid alteration, but not more than two, three or four alterations (e.g., substitutions, deletions, or insertions, e.g., conservative substitutions) relative to one, two, or three CDRs according to Kabat et al. shown in Table 14.

[0677] In some embodiments, the anti-TCRβV antibody molecule, e.g., anti-TCRβ V12 antibody molecule includes at least one, two, or three CDRs according to Kabat et al. (e.g., at least one, two, or three CDRs according to the Kabat definition as set out in Table 14) from a light chain variable region of an antibody described herein, e.g., an antibody as described in Table 14, or a sequence substantially identical (e.g., at least 80%, 85%, 90%, 92%, 95%, 97%, 98%, 99% or higher identical) to any of the aforesaid sequences; or which have at least one amino acid alteration, but not more than two, three or four alterations (e.g., substitutions, deletions, or insertions, e.g., conservative substitutions) relative to one, two, or three CDRs according to Kabat et al. shown in Table 14.

[0678] In some embodiments, the anti-TCRβV antibody molecule, e.g., anti-TCRβ V12 antibody molecule includes at least one, two, three, four, five, or six CDRs according to Kabat et al. (e.g., at least one, two, three, four, five, or six CDRs according to the Kabat definition as set out in Table 14) from the heavy and light chain variable regions of an antibody described herein, e.g., an antibody as described in Table 14, or encoded by the nucleotide sequence in Table 14; or a sequence substantially identical (e.g., at least 80%, 85%, 90%, 92%, 95%, 97%, 98%, 99% or higher identical) to any of the aforesaid sequences; or which have at least one amino acid alteration, but not more than two, three or four alterations (e.g., substitutions, deletions, or insertions, e.g., conservative substitutions) relative to one, two, three, four, five, or six CDRs according to Kabat et al. shown in Table 14.

[0679] In some embodiments, the anti-TCRβV antibody molecule, e.g., anti-TCRβ V12 antibody molecule includes all six CDRs according to Kabat et al. (e.g., all six CDRs according to the Kabat definition as set out in Table 14) from the heavy and light chain variable regions of an antibody described herein, e.g., an antibody as described in Table 14, or encoded by the nucleotide sequence in Table 14; or encoded by the nucleotide sequence in Table 14; or a sequence substantially identical (e.g., at least 80%, 85%, 90%, 92%, 95%, 97%, 98%, 99% or higher identical) to any of the aforesaid sequences; or which have at least one amino acid alteration, but not more than two, three or four alterations (e.g., substitutions, deletions, or insertions, e.g., conservative substitutions) relative to all six CDRs according to Kabat et al. shown in Table 14. In some embodiments, the anti-TCRβV antibody molecule, e.g., anti-TCRβ V12 antibody molecule may include any CDR described herein.

[0680] In some embodiments, the anti-TCRβV antibody molecule, e.g., anti-TCRβ V12 antibody molecule includes at least one, two, or three hypervariable loops that have the same canonical structures as the corresponding hypervariable loop of an antibody described herein, e.g., an antibody described in Table 14, e.g., the same canonical structures as at least loop 1 and/or loop 2 of the heavy and/or light chain variable domains of an antibody described herein. See, e.g., Chothia et al., (1992) J. Mol. Biol. 227:799-817; Tomlinson et al., (1992) J. Mol. Biol. 227:776-798 for descriptions of hypervariable loop canonical structures. These structures can be determined by inspection of the tables described in these references.

[0681] In some embodiments, the anti-TCRβV antibody molecule, e.g., anti-TCRβ V12 antibody molecule includes at least one, two, or three CDRs according to Chothia et al. (e.g., at least one, two, or three CDRs according to the Chothia definition as set out in Table 14) from a heavy chain variable region of an antibody described herein, e.g., an antibody chosen as described in Table 14, or a sequence substantially identical (e.g., at least 80%, 85%, 90%, 92%, 95%, 97%, 98%, 99% or higher identical) to any of the aforesaid sequences; or which have at least one amino acid alteration, but not more than two, three or four alterations (e.g., substitutions, deletions, or insertions, e.g., conservative substitutions) relative to one, two, or three CDRs according to Chothia et al. shown in Table 14.

[0682] In some embodiments, the anti-TCRβV antibody molecule, e.g., anti-TCRβ V12 antibody molecule includes at least one, two, or three CDRs according to Chothia et al. (e.g., at least one, two, or three CDRs according to the Chothia definition as set out in Table 14) from a light chain variable region of an antibody described herein, e.g., an antibody as described in Table 14, or a sequence substantially identical (e.g., at least 80%, 85%, 90%, 92%, 95%, 97%, 98%, 99% or higher identical) to any of the aforesaid sequences; or which have at least one amino acid alteration, but not more than two, three or four alterations (e.g., substitutions, deletions, or insertions, e.g., conservative substitutions) relative to one, two, or three CDRs according to Chothia et al. shown in Table 14.

[0683] In some embodiments, the anti-TCRβV antibody molecule, e.g., anti-TCRβ V12 antibody molecule includes at least one, two, three, four, five, or six CDRs according to Chothia et al. (e.g., at least one, two, three, four, five, or six CDRs according to the Chothia definition as set out in Table 14) from the heavy and light chain variable regions of an antibody described herein, e.g., an antibody as described in Table 14, or encoded by the nucleotide sequence in Table 14; or a sequence substantially identical (e.g., at least 80%, 85%, 90%, 92%, 95%, 97%, 98%, 99% or higher identical) to any of the aforesaid sequences; or which have at least one amino acid alteration, but not more than two, three or four alterations (e.g., substitutions, deletions, or insertions, e.g., conservative substitutions) relative to one, two, three, four, five, or six CDRs according to Chothia et al. shown in Table 14.

[0684] In some embodiments, the anti-TCRβV antibody molecule, e.g., anti-TCRβ V12 antibody molecule includes all six CDRs according to Chothia et al. (e.g., all six CDRs according to the Chothia definition as set out in Table 14) from the heavy and light chain variable regions of an antibody described herein, e.g., an antibody as described in Table 14, or encoded by the nucleotide sequence in Table 14; or encoded by the nucleotide sequence in Table 14; or a sequence substantially identical (e.g., at least 80%, 85%, 90%, 92%, 95%, 97%, 98%, 99% or higher identical) to any of the aforesaid sequences; or which have at least one amino acid alteration, but not more than two, three or four alterations (e.g., substitutions, deletions, or insertions, e.g., conservative substitutions) relative to all six CDRs according to Chothia et al. shown in Table 14. In some embodiments, the anti-TCRβV antibody molecule, e.g., anti-TCRβ V12 antibody molecule may include any CDR described herein.

[0685] In some embodiments, the anti-TCRβV antibody molecule, e.g., anti-TCRβ V12 antibody molecule includes at least one, two, or three CDRs according to a combined CDR (e.g., at least one, two, or three CDRs according to the combined CDR definition as set out in Table 14) from a heavy chain variable region of an antibody described herein, e.g., an antibody chosen as described in Table 14, or a sequence substantially identical (e.g., at least 80%, 85%, 90%, 92%, 95%, 97%, 98%, 99% or higher identical) to any of the aforesaid sequences; or which have at least one amino acid alteration, but not more than two, three or four alterations (e.g., substitutions, deletions, or insertions, e.g., conservative substitutions) relative to one, two, or three CDRs according to combined CDR shown in Table 14.

[0686] In some embodiments, the anti-TCRβV antibody molecule, e.g., anti-TCRβ V12 antibody molecule includes at least one, two, or three CDRs according to a combined CDR (e.g., at least one, two, or three CDRs according to the combined CDR definition as set out in Table 14) from a light chain variable region of an antibody described herein, e.g., an antibody as described in Table 14, or a sequence substantially identical (e.g., at least 80%, 85%, 90%, 92%, 95%, 97%, 98%, 99% or higher identical) to any of the aforesaid sequences; or which have at least one amino acid alteration, but not more than two, three or four alterations (e.g., substitutions, deletions, or insertions, e.g., conservative substitutions) relative to one, two, or three CDRs according to a combined CDR shown in Table 14.

[0687] In some embodiments, the anti-TCRβV antibody molecule, e.g., anti-TCRβ V12 antibody molecule includes at least one, two, three, four, five, or six CDRs according to a combined CDR. (e.g., at least one, two, three, four, five, or six CDRs according to the combined CDR definition as set out in Table 14) from the heavy and light chain variable regions of an antibody described herein, e.g., an antibody as described in Table 14, or encoded by the nucleotide sequence in Table 14; or a sequence substantially identical (e.g., at least 80%, 85%, 90%, 92%, 95%, 97%, 98%, 99% or higher identical) to any of the aforesaid sequences; or which have at least one amino acid alteration, but not more than two, three or four alterations (e.g., substitutions, deletions, or insertions, e.g., conservative substitutions) relative to one, two, three, four, five, or six CDRs according to a combined CDR shown in Table 14.

[0688] In some embodiments, the anti-TCRβV antibody molecule, e.g., anti-TCRβ V12 antibody molecule includes all six CDRs according to a combined CDR (e.g., all six CDRs according to the combined CDR definition as set out in Table 14) from the heavy and light chain variable regions of an antibody described herein, e.g., an antibody as described in Table 14, or encoded by the nucleotide sequence in Table 14; or encoded by the nucleotide sequence in Table 14; or a sequence substantially identical (e.g., at least 80%, 85%, 90%, 92%, 95%, 97%, 98%, 99% or higher identical) to any of the aforesaid sequences; or which have at least one amino acid alteration, but not more than two, three or four alterations (e.g., substitutions, deletions, or insertions, e.g., conservative substitutions) relative to all six CDRs according to a combined CDR shown in Table 14. In some embodiments, the anti-TCRβV antibody molecule, e.g., anti-TCRβ V12 antibody molecule may include any CDR described herein.

[0689] In some embodiments, a combined CDR as set out in Table 13 is a CDR that comprises a Kabat CDR and a Chothia CDR.

[0690] In some embodiments, the anti-TCRβV antibody molecule, e e.g., anti-TCRβ V12 antibody molecule, molecule includes a combination of CDRs or hypervariable loops identified as combined CDRs in Table 13. In some embodiments, the anti-TCRβV antibody molecule, e.g., anti-TCRβ V12 antibody molecule, can contain any combination of CDRs or hypervariable loops according the “combined” CDRs are described in Table 13.

[0691] In some embodiments, the anti-TCRβV antibody molecule, e.g., anti-TCRβ V12 antibody molecule includes a combination of CDRs or hypervariable loops defined according to the Kabat et al. and Chothia et al., or as described in Table 13

[0692] In some embodiments, the anti-TCRβV antibody molecule, e.g., anti-TCRβ V12 antibody molecule can contain any combination of CDRs or hypervariable loops according to the Kabat and Chothia definitions.

[0693] In an embodiment, e.g., an embodiment comprising a variable region, a CDR (e.g., a combined CDR, Chothia CDR or Kabat CDR), or other sequence referred to herein, e.g., in Table 14, the antibody molecule is a monospecific antibody molecule, a bispecific antibody molecule, a bivalent antibody molecule, a biparatopic antibody molecule, or an antibody molecule that comprises an antigen binding fragment of an antibody, e.g., a half antibody or antigen binding fragment of a half antibody. In certain embodiments the antibody molecule comprise a multispecific molecule, e.g., a bispecific molecule, e.g., as described herein.

[0694] In some embodiments, the anti-TCRβV antibody molecule, e.g., anti-TCRβ V12 antibody molecule includes:
[0695] (i) one, two or all of a light chain complementarity determining region 1 (LC CDR1), a light chain complementarity determining region 2 (LC CDR2), and a light chain complementarity determining region 3 (LC CDR3) of SEQ ID NO: 16, SEQ ID NO: 26, SEQ ID NO: 27, SEQ ID NO: 28, SEQ ID NO: 29 or SEQ ID NO: 30, and/or
[0696] (ii) one, two or all of a heavy chain complementarity determining region 1 (HC CDR1), heavy chain complementarity determining region 2 (HC CDR2), and a heavy chain complementarity determining region 3 (HC CDR3) of SEQ ID NO: 15, SEQ ID NO: 23, SEQ ID NO: 24 or SEQ ID NO: 25.

[0697] In some embodiments, the anti-TCRβV antibody molecule, e.g., anti-TCRβ V12 antibody molecule comprises:
[0698] (i) a LC CDR1 amino acid sequence of SEQ ID NO: 20, a LC CDR2 amino acid sequence of SEQ ID NO: 21, or a LC CDR3 amino acid sequence of SEQ ID NO: 22; and/or
[0699] (ii) a HC CDR1 amino acid sequence of SEQ ID NO: 17, a HC CDR2 amino acid sequence of SEQ ID NO: 18, or a HC CDR3 amino acid sequence of SEQ ID NO: 19.

[0700] In some embodiments, the anti-TCRβV antibody molecule, e.g., anti-TCRβ V12 antibody molecule comprises:
[0701] (i) a light chain variable region (VL) comprising a LC CDR1 amino acid sequence of SEQ ID NO: 20, a LC CDR2 amino acid sequence of SEQ ID NO: 21, and a LC CDR3 amino acid sequence of SEQ ID NO: 2; and/or
[0702] (ii) a heavy chain variable region (VH) comprising a HC CDR1 amino acid sequence of SEQ ID NO: 17, a HC CDR2 amino acid sequence of SEQ ID NO: 18, and a HC CDR3 amino acid sequence of SEQ ID NO: 19.

[0703] In some embodiments, the anti-TCRβV antibody molecule, e.g., anti-TCRβ V12 antibody molecule comprises:
[0704] (i) a LC CDR1 amino acid sequence of SEQ ID NO: 63, a LC CDR2 amino acid sequence of SEQ ID NO: 64, or a LC CDR3 amino acid sequence of SEQ ID NO: 65; and/or
[0705] (ii) a HC CDR1 amino acid sequence of SEQ ID NO: 57, a HC CDR2 amino acid sequence of SEQ ID NO: 58, or a HC CDR3 amino acid sequence of SEQ ID NO: 59.

[0706] In some embodiments, the anti-TCRβV antibody molecule, e.g., anti-TCRβ V12 antibody molecule comprises:
[0707] (i) a light chain variable region (VL) comprising a LC CDR1 amino acid sequence of SEQ ID NO: 63, a LC CDR2 amino acid sequence of SEQ ID NO: 64, or a LC CDR3 amino acid sequence of SEQ ID NO: 65; and/or
[0708] (ii) a heavy chain variable region (VH) comprising a HC CDR1 amino acid sequence of SEQ ID NO: 57, a HC CDR2 amino acid sequence of SEQ ID NO: 58, or a HC CDR3 amino acid sequence of SEQ ID NO: 59.

[0709] In some embodiments, the anti-TCRβV antibody molecule, e.g., anti-TCRβ V12 antibody molecule comprises:
[0710] (i) a LC CDR1 amino acid sequence of SEQ ID NO: 66, a LC CDR2 amino acid sequence of SEQ ID NO: 67, or a LC CDR3 amino acid sequence of SEQ ID NO: 68; and/or
[0711] (ii) a HC CDR1 amino acid sequence of SEQ ID NO: 60, a HC CDR2 amino acid sequence of SEQ ID NO: 61, or a HC CDR3 amino acid sequence of SEQ ID NO: 62.

[0712] In some embodiments, the anti-TCRβV antibody molecule, e.g., anti-TCRβ V12 antibody molecule comprises:
[0713] (i) a light chain variable region (VL) comprising a LC CDR1 amino acid sequence of SEQ ID NO: 63, a LC CDR2 amino acid sequence of SEQ ID NO: 64, or a LC CDR3 amino acid sequence of SEQ ID NO: 65; and/or
[0714] (ii) a heavy chain variable region (VH) comprising a HC CDR1 amino acid sequence of SEQ ID NO: 57, a HC CDR2 amino acid sequence of SEQ ID NO: 58, or a HC CDR3 amino acid sequence of SEQ ID NO: 59.

[0715] In one embodiment, the light or the heavy chain variable framework (e.g., the region encompassing at least FR1, FR2, FR3, and optionally FR4) of the anti-TCRβV antibody molecule, e.g., anti-TCRβ V12 antibody molecule can be chosen from: (a) a light or heavy chain variable framework including at least 80%, 85%, 87% 90%, 92%, 93%, 95%, 97%, 98%, or 100% of the amino acid residues from a human light or heavy chain variable framework, e.g., a light or heavy chain variable framework residue from a human mature antibody, a human germline sequence, or a human consensus sequence; (b) a light or heavy chain variable framework including from 20% to 80%, 40% to 60%, 60% to 90%, or 70% to 95% of the amino acid residues from a human light or heavy chain variable framework, e.g., a light or heavy chain variable framework residue from a human mature antibody, a human germline sequence, or a human consensus sequence; (c) a non-human framework (e.g., a rodent framework); or (d) a non-human framework that has been modified, e.g., to remove antigenic or cytotoxic determinants, e.g., deimmunized, or partially humanized. In one embodiment, the light or heavy chain variable framework region (particularly FR1, FR2 and/or FR3) includes a light or heavy chain variable framework sequence at least 70, 75, 80, 85, 87, 88, 90, 92, 94, 95, 96, 97, 98, 99% identical or identical to the frameworks of a VL or VH segment of a human germline gene.

[0716] In some embodiments, the anti-TCRβV antibody molecule, e.g., anti-TCRβ V12 antibody molecule, comprises a heavy chain variable domain having at least one, two, three, four, five, six, seven, ten, fifteen, twenty or more changes, e.g., amino acid substitutions or deletions, from an amino acid sequence described in Table 14, e.g., the amino acid sequence of the FR region in the entire variable region, e.g., shown in FIGS. 5A and 5B, or in SEQ ID NOs: 23-25.

[0717] Alternatively, or in combination with the heavy chain substitutions described herein the anti-TCRβV antibody molecule, e.g., anti-TCRβ V12 antibody molecule comprises a light chain variable domain having at least one, two, three, four, five, six, seven, ten, fifteen, twenty or more amino acid changes, e.g., amino acid substitutions or deletions, from an amino acid sequence of an antibody described herein e.g., the amino acid sequence of the FR region in the entire variable region, e.g., shown in FIGS. 5A and 5B, or in SEQ ID NOs: 26-30.

[0718] In some embodiments, the anti-TCRβV antibody molecule, e.g., anti-TCRβ V12 antibody molecule includes one, two, three, or four heavy chain framework regions shown in FIG. 5A, or a sequence substantially identical thereto.

[0719] In some embodiments, the anti-TCRβV antibody molecule, e.g., anti-TCRβ V12 antibody molecule includes one, two, three, or four light chain framework regions shown in FIG. 5B, or a sequence substantially identical thereto.

[0720] In some embodiments, the anti-TCRβV antibody molecule, e.g., anti-TCRβ V12 antibody molecule comprises the light chain framework region 1 e.g., as shown in FIG. 5B.

[0721] In some embodiments, the anti-TCRβV antibody molecule, e.g., anti-TCRβ V12 antibody molecule comprises the light chain framework region 2 e.g., as shown in FIG. 5B.

[0722] In some embodiments, the anti-TCRβV antibody molecule, e.g., anti-TCRβ V12 antibody molecule comprises the light chain framework region 3, e.g., as shown in FIG. 5B.

[0723] In some embodiments, the anti-TCRβV antibody molecule, e.g., anti-TCRβ V12 antibody molecule comprises the light chain framework region 4, e.g., as shown in FIG. 5B.

[0724] In some embodiments, the anti-TCRβV antibody molecule, e.g., anti-TCRβ V12 antibody molecule comprises a light chain comprising a framework region, e.g., framework region 1 (FR1), comprising a change, e.g., a substitution (e.g., a conservative substitution) at one or more, e.g., all, position disclosed herein according to Kabat numbering. In some embodiments, FR1 comprises an Aspartic Acid at position 1, e.g., a substitution at position 1 according to Kabat numbering, e.g., an Alanine to Aspartic Acid substitution. In some embodiments, FR1 comprises an Asparagine at position 2, e.g., a substitution at position 2 according to Kabat numbering, e.g., an Isoleucine to Asparagine substitution, Serine to Asparagine substitution or Tyrosine to Asparagine substitution. In some embodiments, FR1 comprises a Leucine at position 4, e.g., a substitution at position 4 according to Kabat numbering, e.g., a Methionine to Leucine substitution.

[0725] In some embodiments, the anti-TCRβV antibody molecule, e.g., anti-TCRβ V12 antibody molecule comprises a light chain comprising a framework region, e.g., framework region 1 (FR1), comprising a substitution at position 1 according to Kabat numbering, e.g., an Alanine to Aspartic Acid substitution, a substitution at position 2 according to Kabat numbering, e.g., an Isoleucine to Asparagine substitution, Serine to Asparagine substitution or Tyrosine to Asparagine substitution, and a substitution at position 4 according to Kabat numbering, e.g., a Methionine to Leucine substitution. In some embodiments, the anti-TCRβV antibody molecule, e.g., anti-TCRβ V12 antibody molecule comprises a light chain comprising a framework region, e.g., framework region 1 (FR1), comprising a substitution at position 1 according to Kabat numbering, e.g., an Alanine to Aspartic Acid substitution, and a substitution at position 2 according to Kabat numbering, e.g., an Isoleucine to Asparagine substitution, Serine to Asparagine substitution or Tyrosine to Asparagine substitution. In some embodiments, the anti-TCRβV antibody molecule, e.g., anti-TCRβ V12 antibody molecule comprises a light chain comprising a framework region, e.g., framework region 1 (FR1), comprising a substitution at position 1 according to Kabat numbering, e.g., an Alanine to Aspartic Acid substitution, and a substitution at position 4 according to Kabat numbering, e.g., a Methionine to Leucine substitution. In some embodiments, the anti-TCRβV antibody molecule, e.g., anti-TCRβ V12 antibody molecule comprises a light chain comprising a framework region, e.g., framework region 1 (FR1), comprising a substitution at position 2 according to Kabat numbering, e.g., an Isoleucine to Asparagine substitution, Serine to Asparagine substitution or Tyrosine to Asparagine substitution, and a substitution at position 4 according to Kabat numbering, e.g., a Methionine to Leucine substitution. In some embodiments, the substitution is relative to a human germline light chain framework region sequence.

[0726] In some embodiments, the anti-TCRβV antibody molecule, e.g., anti-TCRβ V12 antibody molecule comprises a light chain comprising a framework region, e.g., framework region 3 (FR3), comprising a change, e.g., a substitution (e.g., a conservative substitution) at one or more, e.g., all, position disclosed herein according to Kabat numbering. In some embodiments, FR3 comprises a Glycine at position 66, e.g., a substitution at position 66 according to Kabat numbering, e.g., a Lysine to Glycine substitution, or a Serine to Glycine substitution. In some embodiments, FR3 comprises an Asparagine at position 69, e.g., a substitution at position 69 according to Kabat numbering, e.g., a Tyrosine to Asparagine substitution. In some embodiments, FR3 comprises a Tyrosine at position 71, e.g., a substitution at position 71 according to Kabat numbering, e.g., a Phenylalanine to Tyrosine substitution, or an Alanine to Tyrosine substitution.

[0727] In some embodiments, the anti-TCRβV antibody molecule, e.g., anti-TCRβ V12 antibody molecule comprises a light chain comprising a framework region, e.g., framework region 3 (FR3), comprising a substitution at position 66 according to Kabat numbering, e.g., a Lysine to Glycine substitution, or a Serine to Glycine substitution, and a substitution at position 69 according to Kabat numbering, e.g., a Tyrosine to Asparagine substitution. In some embodiments, the anti-TCRβV antibody molecule, e.g., anti-TCRβ V12 antibody molecule comprises a light chain comprising a framework region, e.g., framework region 3 (FR3), comprising a substitution at position 66 according to Kabat numbering, e.g., Lysine to Glycine substitution, or a Serine to Glycine substitution, and a substitution at position 71 according to Kabat numbering, e.g., a Phenylalanine to Tyrosine substitution, or an Alanine to Tyrosine substitution. In some embodiments, the anti-TCRβV antibody molecule, e.g., anti-TCRβ V12 antibody molecule comprises a light chain comprising a framework region, e.g., framework region 3 (FR3), comprising a substitution at position 69 according to Kabat numbering, e.g., a Tyrosine to Asparagine substitution and a substitution at position 71 according to Kabat numbering, e.g., a Phenylalanine to Tyrosine substitution, or an Alanine to Tyrosine substitution. In some embodiments, the anti-TCRβV antibody molecule, e.g., anti-TCRβ V12 antibody molecule comprises a light chain comprising a framework region, e.g., framework region 3 (FR3), comprising a substitution at position 66 according to Kabat numbering, e.g., a Lysine to Glycine substitution, or a Serine to Glycine substitution, a substitution at position 69 according to Kabat numbering, e.g., a Tyrosine to Asparagine substitution and a substitution at position 71 according to Kabat numbering, e.g., a Phenylalanine to Tyrosine substitution, or an Alanine to Tyrosine substitution. In some embodiments, the substitution is relative to a human germline light chain framework region sequence.

[0728] In some embodiments, the anti-TCRβV antibody molecule, e.g., anti-TCRβ V12 antibody molecule comprises a light chain comprising: a framework region 1 (FR1) comprising a substitution at position 2 according to Kabat numbering, e.g., a Isoleucine to Asparagine substitution; and a framework region 3 (FR3), comprising a substitution at position 69 according to Kabat numbering, e.g., a Threonine to Asparagine substitution and a substitution at position 71 according to Kabat numbering, e.g., a Phenylalanine to Tyrosine substitution, e.g., as shown in the amino acid sequence of SEQ ID NO: 26. In some embodiments, the substitution is relative to a human germline light chain framework region sequence.

[0729] In some embodiments, the anti-TCRβV antibody molecule, e.g., anti-TCRβ V12 antibody molecule comprises a light chain comprising: (a) a framework region 1 (FR1) comprising a substitution at position 1 according to Kabat numbering, e.g., a Alanine to Aspartic Acid substitution, and a substitution at position 2 according to Kabat numbering, e.g., a Isoleucine to Asparagine substitution; and (b) a framework region 3 (FR3), comprising a substitution at position 69 according to Kabat numbering, e.g., a Threonine to Asparagine substitution and a substitution at position 71 according to Kabat numbering, e.g., a Phenylalanine to Tyrosine substitution, e.g., as shown in the amino acid sequence of SEQ ID NO: 27 In some embodiments, the substitution is relative to a human germline light chain framework region sequence.

[0730] In some embodiments, the anti-TCRβV antibody molecule, e.g., anti-TCRβ V12 antibody molecule comprises a light chain comprising: (a) a framework region 1 (FR1) comprising a substitution at position 2 according to Kabat numbering, e.g., a Serine to Asparagine substitution; and a substitution at position 4 according to Kabat numbering, e.g., a Methionine to Leucine substitution; and (b) a framework region 3 (FR3), comprising a substitution at position 69 according to Kabat numbering, e.g., a Threonine to Asparagine substitution and a substitution at position 71 according to Kabat numbering, e.g., a Phenylalanine to Tyrosine substitution, e.g., as shown in the amino acid sequence of SEQ ID NO: 28 In some embodiments, the substitution is relative to a human germline light chain framework region sequence.

[0731] In some embodiments, the anti-TCRβV antibody molecule, e.g., anti-TCRβ V12 antibody molecule comprises a light chain comprising: (a) a framework region 1 (FR1) comprising a substitution at position 2 according to Kabat numbering, e.g., a Serine to Asparagine substitution; and (b) a framework region 3 (FR3) comprising a substitution at position 66 according to Kabat numbering, e.g., a Lysine to Glycine substitution; a substitution at position 69 according to Kabat numbering, e.g., a Threonine to Asparagine substitution; and a substitution at position 71 according to Kabat numbering, e.g., a Alanine to Tyrosine substitution, e.g., as shown in the amino acid sequence of SEQ ID NO: 29. In some embodiments, the substitution is relative to a human germline light chain framework region sequence.

[0732] In some embodiments, the anti-TCRβV antibody molecule, e.g., anti-TCRβ V12 antibody molecule comprises a light chain comprising: (a) a framework region 1 (FR1) comprising a substitution at position 2 according to Kabat numbering, e.g., a Tyrosine to Asparagine substitution; and (b) a framework region 3 (FR3) comprising a substitution at position 66 according to Kabat numbering, e.g., a Serine to Glycine substitution; a substitution at position 69 according to Kabat numbering, e.g., a Threonine to Asparagine substitution; and a substitution at position 71 according to Kabat numbering, e.g., a Alanine to Tyrosine substitution, e.g., as shown in the amino acid sequence of SEQ ID NO: 29. In some embodiments, the substitution is relative to a human germline light chain framework region sequence.

[0733] In some embodiments, the anti-TCRβV antibody molecule, e.g., anti-TCRβ V12 antibody molecule comprises a light chain variable domain comprising: (a) a framework region 1 (FR1) comprising a change, e.g., a substitution (e.g., a conservative substitution) at one or more (e.g., all) positions disclosed herein according to Kabat numbering, and (b) a framework region 3 (FR3) comprising a change, e.g., a substitution (e.g., a conservative substitution) at one or more (e.g., all) position disclosed herein according to Kabat numbering. In some embodiments, the substitution is relative to a human germline light chain framework region sequence.

[0734] In some embodiments, the anti-TCRβV antibody molecule, e.g., anti-TCRβ V12 antibody molecule comprises the heavy chain framework region 1, e.g., as shown in FIG. 5A.

[0735] In some embodiments, the anti-TCRβV antibody molecule, e.g., anti-TCRβ V12 antibody molecule comprises the heavy chain framework region 2, e.g., as shown in FIG. 5A.

[0736] In some embodiments, the anti-TCRβV antibody molecule, e.g., anti-TCRβ V12 antibody molecule comprises the heavy chain framework region 3, e.g., as shown in FIG. 5A.

[0737] In some embodiments, the anti-TCRβV antibody molecule, e.g., anti-TCRβ V12 antibody molecule comprises the heavy chain framework region 4, e.g., as shown in FIG. 5A.

[0738] In some embodiments, the anti-TCRβV antibody molecule, e.g., anti-TCRβ V12 antibody molecule comprises the heavy chain framework regions 1-4, e.g., SEQ ID NOS: 20-23, or as shown in FIG. 5A.

[0739] In some embodiments, the anti-TCRβV antibody molecule, e.g., anti-TCRβ V12 antibody molecule comprises the light chain framework regions 1-4, e.g., SEQ ID NOs: 26-30, or as shown in FIG. 5B.

[0740] In some embodiments, the anti-TCRβV antibody molecule, e.g., anti-TCRβ V12 antibody molecule comprises the heavy chain framework regions 1-4, e.g., SEQ ID NOs: 23-25; and the light chain framework regions 1-4, e.g., SEQ ID NOs: 26-30, or as shown in FIGS. 5A and 5B.

[0741] In some embodiments, the heavy or light chain variable domain, or both, of, the anti-TCRβV antibody molecule, e.g., anti-TCRβ V12 antibody molecule includes an amino acid sequence, which is substantially identical to an amino acid disclosed herein, e.g., at least 80%, 85%, 90%, 92%, 95%, 97%, 98%, 99% or higher identical to a variable region of an antibody described herein, e.g., an antibody as described in Table 14, or encoded by the nucleotide sequence in Table 14; or which differs at least 1 or 5 residues, but less than 40, 30, 20, or 10 residues, from a variable region of an antibody described herein.

[0742] In some embodiments, the anti-TCRβV antibody molecule, e.g., anti-TCRβ V12 antibody molecule comprises at least one, two, three, or four antigen-binding regions, e.g., variable regions, having an amino acid sequence as set forth in Table 14, or a sequence substantially identical thereto (e.g., a sequence at least about 85%, 90%, 95%, 99% or more identical thereto, or which differs by no more than 1, 2, 5, 10, or 15 amino acid residues from the sequences shown in Table 14. In another embodiment, the anti-TCRβV antibody molecule, e.g., anti-TCRβ V12 antibody molecule includes a VH and/or VL domain encoded by a nucleic acid having a nucleotide sequence as set forth in Table 14, or a sequence substantially identical thereto (e.g., a sequence at least about 85%, 90%, 95%, 99% or more identical thereto, or which differs by no more than 3, 6, 15, 30, or 45 nucleotides from the sequences shown in Table 14.

[0743] In some embodiments, the anti-TCRβV antibody molecule, e.g., anti-TCRβ V12 antibody molecule comprises:
[0744] a VH domain comprising an amino acid sequence chosen from the amino acid sequence of SEQ ID NO: 23, SEQ ID NO:24 or SEQ ID NO:25, an amino acid sequence at least about 85%, 90%, 95%, 99% or more identical to the amino acid sequence SEQ ID NO: 23, SEQ ID NO:24 or SEQ ID NO:25, or an amino acid sequence which differs by no more than 1, 2, 5, 10, or 15 amino acid residues from the amino acid sequence of SEQ ID NO: 23, SEQ ID NO:24 or SEQ ID NO:25; and/or
[0745] a VL domain comprising an amino acid sequence chosen from the amino acid sequence of SEQ ID NO: 26, SEQ ID NO: 27, SEQ ID NO: 28, SEQ ID NO: 29 or SEQ ID NO: 30, an amino acid sequence at least about 85%, 90%, 95%, 99% or more identical to the amino acid sequence of SEQ ID NO: 26, SEQ ID NO: 27, SEQ ID NO: 28, SEQ ID NO: 29 or SEQ ID NO: 30, or an amino acid sequence which differs by no more than 1, 2, 5, 10, or 15 amino acid residues from the amino acid sequence of SEQ ID NO: 26, SEQ ID NO: 27, SEQ ID NO: 28, SEQ ID NO: 29 or SEQ ID NO: 30.

[0746] In some embodiments, the anti-TCRβV antibody molecule, e.g., anti-TCRβ V12 antibody molecule comprises:
[0747] a VH domain comprising the amino acid sequence of SEQ ID NO: 23, an amino acid sequence at least about 85%, 90%, 95%, 99% or more identical to the amino acid sequence SEQ ID NO: 23, or an amino acid sequence which differs by no more than 1, 2, 5, 10, or 15 amino acid residues from the amino acid sequence of SEQ ID NO: 23; and
[0748] a VL domain comprising the amino acid sequence of SEQ ID NO: 26, an amino acid sequence at least about 85%, 90%, 95%, 99% or more identical to the amino acid sequence SEQ ID NO: 26, or an amino acid sequence which differs by no more than 1, 2, 5, 10, or 15 amino acid residues from the amino acid sequence of SEQ ID NO: 26.

[0749] In some embodiments, the anti-TCRβV antibody molecule, e.g., anti-TCRβ V12 antibody molecule comprises:
[0750] a VH domain comprising the amino acid sequence of SEQ ID NO: 23, an amino acid sequence at least about 85%, 90%, 95%, 99% or more identical to the amino acid sequence SEQ ID NO: 23, or an amino acid sequence which differs by no more than 1, 2, 5, 10, or 15 amino acid residues from the amino acid sequence of SEQ ID NO: 23; and
[0751] a VL domain comprising the amino acid sequence of SEQ ID NO: 27, an amino acid sequence at least about 85%, 90%, 95%, 99% or more identical to the amino acid sequence SEQ ID NO: 27, or an amino acid sequence which differs by no more than 1, 2, 5, 10, or 15 amino acid residues from the amino acid sequence of SEQ ID NO: 27.

[0752] In some embodiments, the anti-TCRβV antibody molecule, e.g., anti-TCRβ V12 antibody molecule comprises:
[0753] a VH domain comprising the amino acid sequence of SEQ ID NO: 23, an amino acid sequence at least about 85%, 90%, 95%, 99% or more identical to the amino acid sequence SEQ ID NO: 23, or an amino acid sequence which differs by no more than 1, 2, 5, 10, or 15 amino acid residues from the amino acid sequence of SEQ ID NO: 23; and
[0754] a VL domain comprising the amino acid sequence of SEQ ID NO: 28, an amino acid sequence at least about 85%, 90%, 95%, 99% or more identical to the amino acid sequence SEQ ID NO: 28, or an amino acid sequence which differs by no more than 1, 2, 5, 10, or 15 amino acid residues from the amino acid sequence of SEQ ID NO: 28.

[0755] In some embodiments, the anti-TCRβV antibody molecule, e.g., anti-TCRβ V12 antibody molecule comprises:
[0756] a VH domain comprising the amino acid sequence of SEQ ID NO: 23, an amino acid sequence at least about 85%, 90%, 95%, 99% or more identical to the amino acid sequence SEQ ID NO: 23, or an amino acid sequence which differs by no more than 1, 2, 5, 10, or 15 amino acid residues from the amino acid sequence of SEQ ID NO: 23; and
[0757] a VL domain comprising the amino acid sequence of SEQ ID NO: 29, an amino acid sequence at least about 85%, 90%, 95%, 99% or more identical to the amino acid sequence SEQ ID NO: 29, or an amino acid sequence which differs by no more than 1, 2, 5, 10, or 15 amino acid residues from the amino acid sequence of SEQ ID NO: 29.

[0758] In some embodiments, the anti-TCRβV antibody molecule, e.g., anti-TCRβ V12 antibody molecule comprises:
[0759] a VH domain comprising the amino acid sequence of SEQ ID NO: 23, an amino acid sequence at least about 85%, 90%, 95%, 99% or more identical to the amino acid sequence SEQ ID NO: 23, or an amino acid sequence which differs by no more than 1, 2, 5, 10, or 15 amino acid residues from the amino acid sequence of SEQ ID NO: 23; and
[0760] a VL domain comprising the amino acid sequence of SEQ ID NO: 30, an amino acid sequence at least about 85%, 90%, 95%, 99% or more identical to the amino acid sequence SEQ ID NO: 30, or an amino acid sequence which differs by no more than 1, 2, 5, 10, or 15 amino acid residues from the amino acid sequence of SEQ ID NO: 30.

[0761] In some embodiments, the anti-TCRβV antibody molecule, e.g., anti-TCRβ V12 antibody molecule comprises:
[0762] a VH domain comprising the amino acid sequence of SEQ ID NO: 24, an amino acid sequence at least about 85%, 90%, 95%, 99% or more identical to the amino acid sequence SEQ ID NO: 24, or an amino acid sequence which differs by no more than 1, 2, 5, 10, or 15 amino acid residues from the amino acid sequence of SEQ ID NO: 24; and
[0763] a VL domain comprising the amino acid sequence of SEQ ID NO: 26, an amino acid sequence at least about 85%, 90%, 95%, 99% or more identical to the amino acid sequence SEQ ID NO: 26, or an amino acid sequence which differs by no more than 1, 2, 5, 10, or 15 amino acid residues from the amino acid sequence of SEQ ID NO: 26.

[0764] In some embodiments, the anti-TCRβV antibody molecule, e.g., anti-TCRβ V12 antibody molecule comprises:
[0765] a VH domain comprising the amino acid sequence of SEQ ID NO: 24, an amino acid sequence at least about 85%, 90%, 95%, 99% or more identical to the amino acid sequence SEQ ID NO: 24, or an amino acid sequence which differs by no more than 1, 2, 5, 10, or 15 amino acid residues from the amino acid sequence of SEQ ID NO: 24; and
[0766] a VL domain comprising the amino acid sequence of SEQ ID NO: 27, an amino acid sequence at least about 85%, 90%, 95%, 99% or more identical to the amino acid sequence SEQ ID NO: 27, or an amino acid sequence which differs by no more than 1, 2, 5, 10, or 15 amino acid residues from the amino acid sequence of SEQ ID NO: 27.

[0767] In some embodiments, the anti-TCRβV antibody molecule, e.g., anti-TCRβ V12 antibody molecule comprises:
[0768] a VH domain comprising the amino acid sequence of SEQ ID NO: 24, an amino acid sequence at least about 85%, 90%, 95%, 99% or more identical to the amino acid sequence SEQ ID NO: 24, or an amino acid sequence which differs by no more than 1, 2, 5, 10, or 15 amino acid residues from the amino acid sequence of SEQ ID NO: 24; and
[0769] a VL domain comprising the amino acid sequence of SEQ ID NO: 28, an amino acid sequence at least about 85%, 90%, 95%, 99% or more identical to the amino acid sequence SEQ ID NO: 28, or an amino acid sequence which differs by no more than 1, 2, 5, 10, or 15 amino acid residues from the amino acid sequence of SEQ ID NO: 28.

[0770] In some embodiments, the anti-TCRβV antibody molecule, e.g., anti-TCRβ V12 antibody molecule comprises:
[0771] a VH domain comprising the amino acid sequence of SEQ ID NO: 24, an amino acid sequence at least about 85%, 90%, 95%, 99% or more identical to the amino acid sequence SEQ ID NO: 24, or an amino acid sequence which differs by no more than 1, 2, 5, 10, or 15 amino acid residues from the amino acid sequence of SEQ ID NO: 24; and
[0772] a VL domain comprising the amino acid sequence of SEQ ID NO: 29, an amino acid sequence at least about 85%, 90%, 95%, 99% or more identical to the amino acid sequence SEQ ID NO: 29, or an amino acid sequence which differs by no more than 1, 2, 5, 10, or 15 amino acid residues from the amino acid sequence of SEQ ID NO: 29.

[0773] In some embodiments, the anti-TCRβV antibody molecule, e.g., anti-TCRβ V12 antibody molecule comprises:
[0774] a VH domain comprising the amino acid sequence of SEQ ID NO: 24, an amino acid sequence at least about 85%, 90%, 95%, 99% or more identical to the amino acid sequence SEQ ID NO: 24, or an amino acid sequence which differs by no more than 1, 2, 5, 10, or 15 amino acid residues from the amino acid sequence of SEQ ID NO: 24; and
[0775] a VL domain comprising the amino acid sequence of SEQ ID NO: 30, an amino acid sequence at least about 85%, 90%, 95%, 99% or more identical to the amino acid sequence SEQ ID NO: 30, or an amino acid sequence which differs by no more than 1, 2, 5, 10, or 15 amino acid residues from the amino acid sequence of SEQ ID NO: 30.

[0776] In some embodiments, the anti-TCRβV antibody molecule, e.g., anti-TCRβ V12 antibody molecule comprises:
[0777] a VH domain comprising the amino acid sequence of SEQ ID NO: 25, an amino acid sequence at least about 85%, 90%, 95%, 99% or more identical to the amino acid sequence SEQ ID NO: 25, or an amino acid sequence which differs by no more than 1, 2, 5, 10, or 15 amino acid residues from the amino acid sequence of SEQ ID NO: 25; and
[0778] a VL domain comprising the amino acid sequence of SEQ ID NO: 26, an amino acid sequence at least about 85%, 90%, 95%, 99% or more identical to the amino acid sequence SEQ ID NO: 26, or an amino acid sequence which differs by no more than 1, 2, 5, 10, or 15 amino acid residues from the amino acid sequence of SEQ ID NO: 26.

[0779] In some embodiments, the anti-TCRβV antibody molecule, e.g., anti-TCRβ V12 antibody molecule comprises:
[0780] a VH domain comprising the amino acid sequence of SEQ ID NO: 25, an amino acid sequence at least about 85%, 90%, 95%, 99% or more identical to the amino acid sequence SEQ ID NO: 25, or an amino acid sequence which differs by no more than 1, 2, 5, 10, or 15 amino acid residues from the amino acid sequence of SEQ ID NO: 25; and
[0781] a VL domain comprising the amino acid sequence of SEQ ID NO: 27, an amino acid sequence at least about 85%, 90%, 95%, 99% or more identical to the amino acid sequence SEQ ID NO: 27, or an amino acid sequence which differs by no more than 1, 2, 5, 10, or 15 amino acid residues from the amino acid sequence of SEQ ID NO: 27.

[0782] In some embodiments, the anti-TCRβV antibody molecule, e.g., anti-TCRβ V12 antibody molecule comprises:
[0783] a VH domain comprising the amino acid sequence of SEQ ID NO: 25, an amino acid sequence at least about 85%, 90%, 95%, 99% or more identical to the amino acid sequence SEQ ID NO: 25, or an amino acid sequence which differs by no more than 1, 2, 5, 10, or 15 amino acid residues from the amino acid sequence of SEQ ID NO: 25; and
[0784] a VL domain comprising the amino acid sequence of SEQ ID NO: 28, an amino acid sequence at least about 85%, 90%, 95%, 99% or more identical to the amino acid sequence SEQ ID NO: 28, or an amino acid sequence which differs by no more than 1, 2, 5, 10, or 15 amino acid residues from the amino acid sequence of SEQ ID NO: 28.

[0785] In some embodiments, the anti-TCRβV antibody molecule, e.g., anti-TCRβ V12 antibody molecule comprises:
[0786] a VH domain comprising the amino acid sequence of SEQ ID NO: 25, an amino acid sequence at least about 85%, 90%, 95%, 99% or more identical to the amino acid sequence SEQ ID NO: 25, or an amino acid sequence which differs by no more than 1, 2, 5, 10, or 15 amino acid residues from the amino acid sequence of SEQ ID NO: 25; and
[0787] a VL domain comprising the amino acid sequence of SEQ ID NO: 29, an amino acid sequence at least about 85%, 90%, 95%, 99% or more identical to the amino acid sequence SEQ ID NO: 29, or an amino acid sequence which differs by no more than 1, 2, 5, 10, or 15 amino acid residues from the amino acid sequence of SEQ ID NO: 29.

[0788] In some embodiments, the anti-TCRβV antibody molecule, e.g., anti-TCRβ V12 antibody molecule comprises:
[0789] a VH domain comprising the amino acid sequence of SEQ ID NO: 25, an amino acid sequence at least about 85%, 90%, 95%, 99% or more identical to the amino acid sequence SEQ ID NO: 25, or an amino acid sequence which differs by no more than 1, 2, 5, 10, or 15 amino acid residues from the amino acid sequence of SEQ ID NO: 25; and
[0790] a VL domain comprising the amino acid sequence of SEQ ID NO: 30, an amino acid sequence at least about 85%, 90%, 95%, 99% or more identical to the amino acid sequence SEQ ID NO: 30, or an amino acid sequence which differs by no more than 1, 2, 5, 10, or 15 amino acid residues from the amino acid sequence of SEQ ID NO: 30.

[0791] In some embodiments, the anti-TCRβV antibody molecule, e.g., anti-TCRβ V12 antibody molecule is a full antibody or fragment thereof (e.g., a Fab, F(ab′)₂, Fv, or a single chain Fv fragment (scFv)). In embodiments, the anti-TCRβV antibody molecule, e.g., anti-TCRβ V6 (e.g., anti-TCRβ V6-5*01) antibody molecule is a monoclonal antibody or an antibody with single specificity. In some embodiments, the anti-TCRβV antibody molecule, e.g., anti-TCRβ V12 antibody molecule, can also be a humanized, chimeric, camelid, shark, or an in vitro-generated antibody molecule. In some embodiments, the anti-TCRβV antibody molecule, e.g., anti-TCRβ V12 antibody molecule is a humanized antibody molecule. The heavy and light chains of the anti-TCRβV antibody molecule, e.g., anti-TCRβ V12 antibody molecule can be full-length (e.g., an antibody can include at least one, and preferably two, complete heavy chains, and at least one, and preferably two, complete light chains) or can include an antigen-binding fragment (e.g., a Fab, F(ab′)2, Fv, a single chain Fv fragment, a single domain antibody, a diabody (dAb), a bivalent antibody, or bispecific antibody or fragment thereof, a single domain variant thereof, or a camelid antibody).

[0792] In some embodiments, the anti-TCRβV antibody molecule, e.g., anti-TCRβ V12 antibody molecule is in the form of a multispecific molecule, e.g., a bispecific molecule, e.g., as described herein.

[0793] In some embodiments, the anti-TCRβV antibody molecule, e.g., anti-TCRβ V12 antibody molecule has a heavy chain constant region (Fc) chosen from, e.g., the heavy chain constant regions of IgG1, IgG2, IgG3, IgG4, IgM, IgA1, IgA2, IgD, and IgE. In some embodiments, the Fc region is chosen from the heavy chain constant regions of IgG1, IgG2, IgG3, and IgG4. In some embodiments, the Fc region is chosen from the heavy chain constant region of IgG1 or IgG2 (e.g., human IgG1, or IgG2). In some embodiments, the heavy chain constant region is human IgG1.

[0794] In some embodiments, the anti-TCRβV antibody molecule, e.g., anti-TCRβ V12 antibody molecule has a light chain constant region chosen from, e.g., the light chain constant regions of kappa or lambda, preferably kappa (e.g., human kappa). In one embodiment, the constant region is altered, e.g., mutated, to modify the properties of the anti-TCRβV antibody molecule, e.g., anti-TCRβ V12 antibody molecule (e.g., to increase or decrease one or more of: Fc receptor binding, antibody glycosylation, the number of cysteine residues, effector cell function, or complement function). For example, the constant region is mutated at positions 296 (M to Y), 298 (S to T), 300 (T to E), 477 (H to K) and 478 (N to F) to alter Fc receptor binding (e.g., the mutated positions correspond to positions 132 (M to Y), 134 (S to T), 136 (T to E), 313 (H to K) and 314 (N to F) of SEQ ID NOs: 212 or 214; or positions 135 (M to Y), 137 (S to T), 139 (T to E), 316 (H to K) and 317 (N to F) of SEQ ID NOs: 215, 216, 217 or 218).

TABLE 14
Amino acid and nucleotide sequences for murine and humanized antibody molecules. The
antibody molecules include murine mAb 16G8 and humanized mAb 16G8. The amino acid
the heavyand light chain CDRs, and the amino acid and nucleotide sequences of the
heavy and light chain variable regions, and the heavy and light chains are shown.
16G8 (murine)

| | | |
|---|---|---|
| SEQ ID NO: 17 | HC CDR1 (Combined) | GFTFSNFGMH |
| SEQ ID NO: 18 | HC CDR2 (Combined) | YISSGSSTIYYADTLKG |
| SEQ ID NO: 19 | HC CDR3 (Combined) | RGEGAMDY |
| SEQ ID NO: 57 | HC CDR1 (Kabat) | NFGMH |
| SEQ ID NO: 58 | HC CDR2 (Kabat) | YISSGSSTIYYADTLKG |
| SEQ ID NO: 59 | HC CDR3 (Kabat) | RGEGAMDY |
| SEQ ID NO: 60 | HC CDR1 (Chothia) | GFTFSNF |
| SEQ ID NO: 61 | HC CDR2 (Chothia) | SSGSST |
| SEQ ID NO: 62 | HC CDR3 (Chothia) | RGEGAMDY |
| SEQ ID NO: 15 | VH | DVQLVESGGGLVQPGGSRKLSCAASGFTFSNF |
| | | GMHWVRQAPDKGLEWVAYISSGSSTIYYADT |
| | | LKGRFTISRDNPKNTLFLQMTSLRSEDTAMYY |
| | | CARRGEGAMDYWGQGTSVTVSS |
| SEQ ID NO: 20 | LC CDR1 (Combined) | RASSSVNYIY |
| SEQ ID NO: 21 | LC CDR2 (Combined)) | YTSNLAP |
| SEQ ID NO: 22 | LC CDR3(Combined) | QQFTSSPFT |
| SEQ ID NO: 63 | LC CDR1 (Kabat) | RASSSVNYIY |
| SEQ ID NO: 64 | LC CDR2 (Kabat) | YTSNLAP |
| SEQ ID NO: 65 | LC CDR3 (Kabat) | QQFTSSPFT |
| SEQ ID NO: 66 | LC CDR1 (Chothia) | RASSSVNYIY |
| SEQ ID NO: 67 | LC CDR2 (Chothia) | YTSNLAP |
| SEQ ID NO: 68 | LC CDR3 (Chothia) | QQFTSSPFT |
| SEQ ID NO: 16 | VL | ENVLTQSPAIMSASLGEKVTMSCRASSSVNYI |
| | | YWYQQKSDASPKLWIYYTSNLAPGVPTRFSGS |
| | | GSGNSYSLTISSMEGEDAATYYCQQFTSSPFTF |
| | | GSGTKLEIK |

16G8 humanized HC-1

| | | |
|---|---|---|
| SEQ ID NO: 17 | HC CDR1 (Combined) | GFTFSNFGMH |
| SEQ ID NO: 18 | HC CDR2 (Combined) | YISSGSSTIYYADTLKG |
| SEQ ID NO: 19 | HC CDR3 (Combined) | RGEGAMDY |
| SEQ ID NO: 23 | VH | EVQLVESGGGLVQPGGSLRLSCAASGFTFSNF |
| | | GMHWVRQAPGKGLEWVSYISSGSSTIYYADT |
| | | LKGRFTISRDNAKNSLYLQMNSLRAEDTAVY |
| | | YCARRGEGAMDYWGQGTTVTVSS |
| SEQ ID NO: 31 | DNA VH | GAGGTGCAGCTGGTTGAATCTGGCGGAGGA |
| | | TTGGTTCAGCCTGGCGGCTCTCTGAGACTGT |
| | | CTTGTGCCGCTTCTGGCTTCACCTTCTCCAAC |
| | | TTCGGCATGCACTGGGTCCGACAGGCCCCTG |
| | | GAAAAGGACTGGAATGGGTGTCCTACATCT |
| | | CCTCCGGCTCCTCCACCATCTACTACGCTGA |
| | | CACCCTGAAGGGCAGATTCACCATCTCTCGG |
| | | GACAACGCCAAGAACTCCCTGTACCTGCAG |
| | | ATGAACAGCCTGAGAGCCGAGGACACCGCC |
| | | GTGTACTACTGTGCTAGAAGAGGCGAGGGC |
| | | GCCATGGATTATTGGGGCCAGGGAACCACA |
| | | GTGACCGTGTCTAGC |

16G8 humanized HC-2

| | | |
|---|---|---|
| SEQ ID NO: 17 | HC CDR1 (Combined) | GFTFSNFGMH |
| SEQ ID NO: 18 | HC CDR2 (Combined) | YISSGSSTIYYADTLKG |
| SEQ ID NO: 19 | HC CDR3 (Combined) | RGEGAMDY |
| SEQ ID NO: 24 | VH | EVOLVESGGGLVQPGGSLRLSCAASGFTFSNF |
| | | GMHWVRQAPGKGLEWVSYISSGSSTIYYADT |
| | | LKGRFTISRDNSKNTLYLQMNSLRAEDTAVYY |
| | | CARRGEGAMDYWGQGTTVTVSS |
| SEQ ID NO: 32 | DNA VH | GAGGTGCAGCTGGTTGAATCTGGCGGAGGA |
| | | TTGGTTCAGCCTGGCGGCTCTCTGAGACTGT |
| | | CTTGTGCCGCTTCTGGCTTCACCTTCTCCAAC |
| | | TTCGGCATGCACTGGGTCCGACAGGCCCCTG |
| | | GAAAAGGACTGGAATGGGTGTCCTACATCT |
| | | CCTCCGGCTCCTCCACCATCTACTACGCTGA |
| | | CACCCTGAAGGGCAGATTCACCATCAGCCG |
| | | GGACAACTCCAAGAACACCCTGTACCTGCA |
| | | GATGAACTCCCTGAGAGCCGAGGACACCGC |
| | | CGTGTACTACTGTGCTAGAAGAGGCGAGGG |
| | | CGCCATGGATTATTGGGGCCAGGGAACCAC |
| | | AGTGACCGTGTCTAGC |

16G8 humanized HC-3

| | | |
|---|---|---|
| SEQ ID NO: 17 | HC CDR1 (Combined) | GFTFSNFGMH |
| SEQ ID NO: 18 | HC CDR2 (Combined) | YISSGSSTIYYADTLKG |
| SEQ ID NO: 19 | HC CDR3 (Combined) | RGEGAMDY |
| SEQ ID NO: 25 | VH | QVQLVESGGGVVQPGRSLRLSCAASGFTFSNF |
| | | GMHWVRQAPGKGLEWVAYISSGSSTIYYADT |
| | | LKGRFTISRDNSKNTLYLQMNSLRAEDTAVYY |
| | | CARRGEGAMDYWGQGTTVTVSS |
| SEQ ID NO: 33 | DNA VH | CAGGTGCAGCTGGTGGAATCTGGTGGCGGA |
| | | GTTGTGCAGCCTGGCAGATCCCTGAGACTGT |
| | | CTTGTGCCGCCTCTGGCTTCACCTTCTCCAA |
| | | CTTCGGCATGCACTGGGTCCGACAGGCCCCT |
| | | GGAAAAGGATTGGAGTGGGTCGCCTACATC |
| | | TCCTCCGGCTCCTCCACCATCTACTACGCTG |
| | | ACACCCTGAAGGGCAGATTCACCATCAGCC |
| | | GGGACAACTCCAAGAACACCCTGTACCTGC |
| | | AGATGAACTCCCTGAGAGCCGAGGACACCG |
| | | CCGTGTACTACTGTGCTAGAAGAGGCGAGG |
| | | GCGCCATGGATTATTGGGGCCAGGGAACCA |
| | | CAGTGACCGTGTCTAGC |

16G8 humanized LC-1

| | | |
|---|---|---|
| SEQ ID NO: 20 | LC CDR1 (Combined) | RASSSVNYIY |
| SEQ ID NO: 21 | LC CDR2 (Combined)) | YTSNLAP |
| SEQ ID NO: 22 | LC CDR3(Combined) | QQFTSSPFT |
| SEQ ID NO: 26 | VL | DNQLTQSPSFLSASVGDRVTITCRASSSVNYIY |
| | | WYQQKPGKAPKLLIYYTSNLAPGVPSRFSGSG |
| | | SGNEYTLTISSLQPEDFATYYCQQFTSSPFTFG |
| | | QGTKLEIK |
| SEQ ID NO: 34 | DNA VL | GATAACCAGCTGACCCAGTCTCCTAGCTTCC |
| | | TGTCTGCCTCTGTGGGCGACAGAGTGACAAT |
| | | TACCTGCCGGGCCTCCTCCTCCGTGAACTAC |
| | | ATCTACTGGTATCAGCAGAAGCCCGGCAAG |
| | | GCCCCTAAGCTGCTGATCTACTACACCTCCA |
| | | ATCTGGCCCCTGGCGTGCCCTCTAGATTTTC |
| | | CGGATCTGGCTCCGGCAACGAGTATACCCTG |
| | | ACAATCTCCAGCCTGCAGCCTGAGGACTTCG |
| | | CCACCTACTACTGCCAGCAGTTCACCTCCTC |
| | | TCCATTCACCTTTGGCCAGGGCACCAAGCTG |
| | | GAAATCAAA |

16G8 humanized LC-2

| | | |
|---|---|---|
| SEQ ID NO: 20 | LC CDR1 (Combined) | RASSSVNYIY |
| SEQ ID NO: 21 | LC CDR2 (Combined)) | YTSNLAP |
| SEQ ID NO: 22 | LC CDR3(Combined) | QQFTSSPFT |
| SEQ ID NO: 27 | VL | DNQLTQSPSSLSASVGDRVTITCRASSSVNYIY |
| | | WYQQKPGKAPKLLIYYTSNLAPGVPSRFSGSG |
| | | SGNDYTLTISSLQPEDFATYYCQQFTSSPFTFG |
| | | QGTKLEIK |
| SEQ ID NO: 35 | DNA VL | ATAACCAGCTGACCCAGTCTCCTTCCAGCCT |
| | | GTCTGCTTCTGTGGGCGACAGAGTGACAATT |
| | | ACCTGCCGGGCCTCCTCCTCCGTGAACTACA |
| | | TCTACTGGTATCAGCAGAAGCCCGGCAAGG |
| | | CCCCTAAGCTGCTGATCTACTACACCTCCAA |
| | | TCTGGCCCCTGGCGTGCCCTCTAGATTTTCC |
| | | GGATCTGGCTCCGGCAACGACTATACCCTGA |
| | | CAATCTCCAGCCTGCAGCCTGAGGACTTCGC |
| | | CACCTACTACTGCCAGCAGTTCACCTCCTCT |
| | | CCATTCACCTTTGGCCAGGGCACCAAGCTGG |
| | | AAATCAAA |

16G8 humanized LC-3

| | | |
|---|---|---|
| SEQ ID NO: 20 | LC CDR1 (Combined) | RASSSVNYIY |
| SEQ ID NO: 21 | LC CDR2 (Combined)) | YTSNLAP |
| SEQ ID NO: 22 | LC CDR3(Combined) | QQFTSSPFT |
| SEQ ID NO: 28 | VL | ENVLTQSPATLSVSPGERATLSCRASSSVNYIY |
| | | WYQQKPGQAPRLLIYYTSNLAPGIPARFSGSG |
| | | SGNEYTLTISSLQSEDFAVYYCQQFTSSPFTFG |
| | | QGTKLEIK |
| SEQ ID NO: 36 | DNA VL | GAGAATGTGCTGACCCAGTCTCCTGCCACAC |
| | | TGTCTGTTAGCCCTGGCGAGAGAGCTACCCT |
| | | GAGCTGCAGAGCCTCTTCCTCCGTGAACTAC |
| | | ATCTACTGGTATCAGCAGAAGCCCGGCCAG |
| | | GCTCCTAGACTGCTGATCTACTACACCTCCA |
| | | ATCTGGCCCCTGGCATCCCTGCCAGATTTTC |
| | | CGGATCTGGCTCCGGCAACGAGTATACCCTG |
| | | ACCATCTCCAGCCTGCAGTCCGAGGACTTTG |
| | | CTGTGTACTATTGCCAGCAGTTCACAAGCAG |
| | | CCCTTTCACCTTTGGCCAGGGCACCAAGCTG |
| | | GAAATCAAA |

16G8 humanized LC-4

| | | |
|---|---|---|
| SEQ ID NO: 20 | LC CDR1 (Combined) | RASSSVNYIY |
| SEQ ID NO: 21 | LC CDR2 (Combined)) | YTSNLAP |
| SEQ ID NO: 22 | LC CDR3(Combined) | QQFTSSPFT |
| SEQ ID NO: 29 | VL | QNVLTQPPSASGTPGQRVTISCRASSSVNYIYW |
| | | YQQLPGTAPKLLIYYTSNLAPGVPDRFSGSGS |
| | | GNSYSLAISGLRSEDEADYYCQQFTSSPFTFGT |
| | | GTKVTVL |
| SEQ ID NO: 37 | DNA VL | CAGAATGTGCTGACCCAACCTCCTTCCGCCT |
| | | CTGGCACACCTGGACAGAGAGTGACAATCT |
| | | CCTGCCGGGCCTCCTCCTCCGTGAACTACAT |
| | | CTACTGGTATCAGCAGCTGCCCGGCACCGCT |
| | | CCTAAACTGCTGATCTACTACACCTCCAATC |
| | | TGGCCCCTGGCGTGCCCGATAGATTTTCCGG |
| | | ATCTGGCTCCGGCAACTCCTACAGCCTGGCT |
| | | ATCTCTGGCCTGAGATCTGAGGACGAGGCC |
| | | GACTACTACTGCCAGCAGTTCACCTCCTCTC |
| | | CATTCACCTTTGGCACCGGCACCAAAGTGAC |
| | | AGTTCTT |

16G8 humanized LC-5

| | | |
|---|---|---|
| SEQ ID NO: 20 | LC CDR1 (Combined) | RASSSVNYIY |
| SEQ ID NO: 21 | LC CDR2 (Combined)) | YTSNLAP |
| SEQ ID NO: 22 | LC CDR3(Combined) | QQFTSSPFT |
| SEQ ID NO: 30 | VL | SNELTQPPSVSVSPGQTARITCRASSSVNYIYW |
| | | YQQKSGQAPVLVIYYTSNLAPGIPERFSGSGSG |
| | | NMYTLTISGAQVEDEADYYCQQFTSSPFTFGT |
| | | GTKVTVL |
| SEQ ID NO: 38 | DNA VL | TCTAATGAGCTGACCCAGCCTCCTTCCGTGT |
| | | CCGTGTCTCCTGGACAGACCGCCAGAATTAC |
| | | CTGCCGGGCCTCCTCCTCCGTGAACTACATC |
| | | TACTGGTATCAGCAGAAGTCCGGCCAGGCT |
| | | CCTGTGCTCGTGATCTACTACACCTCCAATC |
| | | TGGCCCCTGGCATCCCTGAGAGATTCTCCGG |
| | | ATCTGGCTCCGGCAACATGTACACCCTGACC |
| | | ATCTCTGGCGCCCAGGTGGAAGATGAGGCC |
| | | GACTACTACTGCCAGCAGTTCACCTCCTCTC |
| | | CATTCACCTTTGGCACCGGCACCAAAGTGAC |
| | | AGTTCTT |

TABLE 17
Constant region amino acid sequences of human IgG
heavy chains and human kappa light chain

| | | |
|---|---|---|
| Human kappa | LC | RTVAAPSVFI FPPSDEQLKS GTASVVCLLN NFYPREAKVQ |
| constant region | | WKVDNALQSG NSQESVTEQD SKDSTYSLSS TLTLSKADYE |
| SEQ ID NO: 39 | | KHKVYACEVT HQGLSSPVTK SFNRGEC |
| IgG4 (S228P) | HC | ASTKGPSVFPLAPCSRSTSESTAALGCLVKDYFPEPVTVSWNSGAL |
| mutant constant | | TSGVHTFPAVLQSSGLYSLSSVVTVPSSSLGTKTYTCNVDHKPSNT |
| region (EU | | KVDKRVESKYGPPCPPCPAPEFLGGPSVFLFPPKPKDTLMISRTPEV |
| Numbering) | | TCVVVDVSQEDPEVQFNWYVDGVEVHNAKTKPREEQFNSTYRV |
| SEQ ID NO: 40 | | VSVLTVLHQDWLNGKEYKCKVSNKGLPSSIEKTISKAKGQPREPQ |
| | | VYTLPPSQEEMTKNQVSLTCLVKGFYPSDIAVEWESNGQPENNYK |
| | | TTPPVLDSDGSFFLYSRLTVDKSRWQEGNVFSCSVMHEALHNHYT |
| | | QKSLSLSLG |
| IgG1 wild type | HC | ASTKGPSVFPLAPSSKSTSGGTAALGCLVKDYFPEPVTVSWNSGA |
| SEQ ID NO: 41 | | LTSGVHTFPAVLQSSGLYSLSSVVTVPSSSLGTQTYICNVNHKPSN |
| | | TKVDKRVEPKSCDKTHTCPPCPAPELLGGPSVFLFPPKPKDTLMIS |
| | | RTPEVTCVVVDVSHEDPEVKFNWYVDGVEVHNAKTKPREEQYN |
| | | STYRVVSVLTVLHQDWLNGKEYKCKVSNKALPAPIEKTISKAKG |
| | | QPREPQVYTLPPSREEMTKNQVSLTCLVKGFYPSDIAVEWESNGQ |
| | | PENNYKTTPPVLDSDGSFFLYSKLTVDKSRWQQGNVFSCSVMHE |
| | | ALHNHYTQKSLSLSPGK |
| IgG1 (N297A) | HC | ASTKGPSVFPLAPSSKSTSGGTAALGCLVKDYFPEPVTVSWNSGA |
| mutant constant | | LTSGVHTFPAVLQSSGLYSLSSVVTVPSSSLGTQTYICNVNHKPSN |
| region (EU | | TKVDKRVEPKSCDKTHTCPPCPAPELLGGPSVFLFPPKPKDTLMIS |
| Numbering) | | RTPEVTCVVVDVSHEDPEVKFNWYVDGVEVHNAKTKPREEQYA |
| SEQ ID NO: 42 | | STYRVVSVLTVLHQDWLNGKEYKCKVSNKALPAPIEKTISKAKG |
| | | QPREPQVYTLPPSREEMTKNQVSLTCLVKGFYPSDIAVEWESNGQ |
| | | PENNYKTTPPVLDSDGSFFLYSKLTVDKSRWQQGNVFSCSVMHE |
| | | ALHNHYTQKSLSLSPGK |

### B Cell, Macrophage & Dendritic Cell Engagers

[0795] Broadly, B cells, also known as B lymphocytes, are a type of white blood cell of the lymphocyte subtype. They function in the humoral immunity component of the adaptive immune system by secreting antibodies. Additionally, B cells present antigen (they are also classified as professional antigen-presenting cells (APCs)) and secrete cytokines. Macrophages are a type of white blood cell that engulfs and digests cellular debris, foreign substances, microbes, cancer cells via phagocytosis. Besides phagocytosis, they play important roles in nonspecific defense (innate immunity) and also help initiate specific defense mechanisms (adaptive immunity) by recruiting other immune cells such as lymphocytes. For example, they are important as antigen presenters to T cells. Beyond increasing inflammation and stimulating the immune system, macrophages also play an important anti-inflammatory role and can decrease immune reactions through the release of cytokines. Dendritic cells (DCs) are antigen-presenting cells that function in processing antigen material and present it on the cell surface to the T cells of the immune system.

[0796] The present disclosure provides, inter alia, multispecific (e.g., bi-, tri-, quad-specific) or multifunctional molecules, that include, e.g., are engineered to contain, one or more B cell, macrophage, and/or dendritic cell engager that mediate binding to and/or activation of a B cell, macrophage, and/or dendritic cell.

[0797] Accordingly, in some embodiments, the immune cell engager comprises a B cell, macrophage, and/or dendritic cell engager chosen from one or more of CD40 ligand (CD40L) or a CD70 ligand; an antibody molecule that binds to CD40 or CD70; an antibody molecule to OX40; an OX40 ligand (OX40L); an agonist of a Toll-like receptor (e.g., as described herein, e.g., a TLR4, e.g., a constitutively active TLR4 (caTLR4), or a TLR9 agonists); a 41BB; a CD2; a CD47; or a STING agonist, or a combination thereof.

[0798] In some embodiments, the B cell engager is a CD40L, an OX40L, or a CD70 ligand, or an antibody molecule that binds to OX40, CD40 or CD70.

[0799] In some embodiments, the macrophage engager is a CD2 agonist. In some embodiments, the macrophage engager is an antigen binding domain that binds to: CD40L or antigen binding domain or ligand that binds CD40, a Toll like receptor (TLR) agonist (e.g., as described herein), e.g., a TLR9 or TLR4 (e.g., caTLR4 (constitutively active TLR4), CD47, or a STING agonist. In some embodiments, the STING agonist is a cyclic dinucleotide, e.g., cyclic di-GMP (cdGMP) or cyclic di-AMP (cdAMP). In some embodiments, the STING agonist is biotinylated.

[0800] In some embodiments, the dendritic cell engager is a CD2 agonist. In some embodiments, the dendritic cell engager is a ligand, a receptor agonist, or an antibody molecule that binds to one or more of: OX40L, 41BB, a TLR agonist (e.g., as described herein) (e.g., TLR9 agonist, TLR4 (e.g., caTLR4 (constitutively active TLR4)), CD47, or and a STING agonist. In some embodiments, the STING agonist is a cyclic dinucleotide, e.g., cyclic di-GMP (cdGMP) or cyclic di-AMP (cdAMP). In some embodiments, the STING agonist is biotinylated.

[0801] In other embodiments, the immune cell engager mediates binding to, or activation of, one or more of a B cell, a macrophage, and/or a dendritic cell. Exemplary B cell, macrophage, and/or dendritic cell engagers can be chosen from one or more of CD40 ligand (CD40L) or a CD70 ligand; an antibody molecule that binds to CD40 or CD70; an antibody molecule to OX40; an OX40 ligand (OX40L); a Toll-like receptor agonist (e.g., a TLR4, e.g., a constitutively active TLR4 (caTLR4) or a TLR9 agonist); a 41BB agonist; a CD2; a CD47; or a STING agonist, or a combination thereof.

[0802] In some embodiments, the B cell engager is chosen from one or more of a CD40L, an OX40L, or a CD70 ligand, or an antibody molecule that binds to OX40, CD40 or CD70.

[0803] In other embodiments, the macrophage cell engager is chosen from one or more of a CD2 agonist; a CD40L; an OX40L; an antibody molecule that binds to OX40, CD40 or CD70; a Toll-like receptor agonist or a fragment thereof (e.g., a TLR4, e.g., a constitutively active TLR4 (caTLR4)); a CD47 agonist; or a STING agonist.

[0804] In other embodiments, the dendritic cell engager is chosen from one or more of a CD2 agonist, an OX40 antibody, an OX40L, 41BB agonist, a Toll-like receptor agonist or a fragment thereof (e.g., a TLR4, e.g., a constitutively active TLR4 (caTLR4)), CD47 agonist, or a STING agonist.

[0805] In one embodiment, the OX40L comprises the amino acid sequence: QVSHRYPRIQSIKVQFTEYKKEKGFILTSQKEDEIMKVQNNSVIINCDGFYLISLKGYFSQEVNI SLHYQKDEEPLFQLKKVRSVNSLMVASLTYKDKVYLNVTTDNTSLDDFHVNGGELILIHQNP GEFCVL (SEQ ID NO: 7245), a fragment thereof, or an amino acid sequence substantially identical thereto (e.g., 95% to 99.9% identical thereto, or having at least one amino acid alteration, but not more than five, ten or fifteen alterations (e.g., substitutions, deletions, or insertions, e.g., conservative substitutions) to the amino acid sequence of SEQ ID NO: 7245.

[0806] In another embodiment, the CD40L comprises the amino acid sequence: MQKGDQNPQIAAHVISEASSKTTSVLQWAEKGYYTMSNNLVTLENGKQLTVKRQGLYYIYA QVTFCSNREASSQAPFIASLCLKSPGRFERILLRAANTHSSAKPCGQQSIHLGGVFELQPGASV FVNVTDPSQVSHGTGFTSFGLLKL (SEQ ID NO: 7246), a fragment thereof, or an amino acid sequence substantially identical thereto (e.g., 95% to 99.9% identical thereto, or having at least one amino acid alteration, but not more than five, ten or fifteen alterations (e.g., substitutions, deletions, or insertions, e.g., conservative substitutions) to the amino acid sequence of SEQ ID NO: 7246.

[0807] In yet other embodiments, the STING agonist comprises a cyclic dinucleotide, e.g., a cyclic di-GMP (cdGMP), a cyclic di-AMP (cdAMP), or a combination thereof, optionally with 2′,5′ or 3′,5′ phosphate linkages.

[0808] In one embodiment, the immune cell engager includes 41BB ligand, e.g., comprising the amino acid sequence: ACPWAVSGARASPGSAASPRLREGPELSPDDPAGLLDLRQGMFAQLVAQNVLLIDGPLSWYS DPGLAGVSLTGGLSYKEDTKELVVAKAGVYYVFFQLELRRVVAGEGSGSVSLALHLQPLRS AAGAAALALTVDLPPASSEARNSAFGFQGRLLHLSAGQRLGVHLHTEARARHAWQLTQGAT VLGLFRVTPEIPAGLPSPRSE (SEQ ID NO: 7247), a fragment thereof, or an amino acid sequence substantially identical thereto (e.g., 95% to 99.9% identical thereto, or having at least one amino acid alteration, but not more than five, ten or fifteen alterations (e.g., substitutions, deletions, or insertions, e.g., conservative substitutions) to the amino acid sequence of SEQ ID NO: 7247.

### Toll-Like Receptors

[0809] Toll-Like Receptors (TLRs) are evolutionarily conserved receptors are homologues of the Drosophila Toll protein, and recognize highly conserved structural motifs known as pathogen-associated microbial patterns (PAMPs), which are exclusively expressed by microbial pathogens, or danger-associated molecular patterns (DAMPs) that are endogenous molecules released from necrotic or dying cells. PAMPs include various bacterial cell wall components such as lipopolysaccharide (LPS), peptidoglycan (PGN) and lipopeptides, as well as flagellin, bacterial DNA and viral double-stranded RNA. DAMPs include intracellular proteins such as heat shock proteins as well as protein fragments from the extracellular matrix. Stimulation of TLRs by the corresponding PAMPs or DAMPs initiates signaling cascades leading to the activation of transcription factors, such as AP-1, NF-κB and interferon regulatory factors (IRFs). Signaling by TLRs results in a variety of cellular responses, including the production of interferons (IFNs), pro-inflammatory cytokines and effector cytokines that direct the adaptive immune response. TLRs are implicated in a number of inflammatory and immune disorders and play a role in cancer (Rakoff-Nahoum S. & Medzhitov R., 2009. Toll-like receptors and cancer. Nat Revs Cancer 9:57-63.)

[0810] TLRs are type I transmembrane proteins characterized by an extracellular domain containing leucine-rich repeats (LRRs) and a cytoplasmic tail that contains a conserved region called the Toll/IL-1 receptor (TIR) domain. Ten human and twelve murine TLRs have been characterized, TLR1 to TLR10 in humans, and TLR1 to TLR9, TLR11, TLR12 and TLR13 in mice, the homolog of TLR10 being a pseudogene. TLR2 is essential for the recognition of a variety of PAMPs from Gram-positive bacteria, including bacterial lipoproteins, lipomannans and lipoteichoic acids. TLR3 is implicated in virus-derived double-stranded RNA. TLR4 is predominantly activated by lipopolysaccharide. TLR5 detects bacterial flagellin and TLR9 is required for response to unmethylated CpG DNA. Finally, TLR7 and TLR8 recognize small synthetic antiviral molecules, and single-stranded RNA was reported to be their natural ligand. TLR11 has been reported to recognize uropathogenic E. coli and a profilin-like protein from Toxoplasma gondii. The repertoire of specificities of the TLRs is apparently extended by the ability of TLRs to heterodimerize with one another. For example, dimers of TLR2 and TLR6 are required for responses to diacylated lipoproteins while TLR2 and TLR1 interact to recognize triacylated lipoproteins. Specificities of the TLRs are also influenced by various adapter and accessory molecules, such as MD-2 and CD14 that form a complex with TLR4 in response to LPS.

[0811] TLR signaling consists of at least two distinct pathways: a MyD88-dependent pathway that leads to the production of inflammatory cytokines, and a MyD88-independent pathway associated with the stimulation of IFN-β and the maturation of dendritic cells. The MyD88-dependent pathway is common to all TLRs, except TLR3 (Adachi O. et al., 1998. Targeted disruption of the MyD88 gene results in loss of IL-1- and IL-18-mediated function. Immunity. 9(1):143-50). Upon activation by PAMPs or DAMPs, TLRs hetero- or homodimerize inducing the recruitment of adaptor proteins via the cytoplasmic TIR domain. Individual TLRs induce different signaling responses by usage of the different adaptor molecules. TLR4 and TLR2 signaling requires the adaptor TIRAP/Mal, which is involved in the MyD88-dependent pathway. TLR3 triggers the production of IFN-β in response to double-stranded RNA, in a MyD88-independent manner, through the adaptor TRIF/TICAM-1. TRAM/TICAM-2 is another adaptor molecule involved in the MyD88-independent pathway which function is restricted to the TLR4 pathway.

[0812] TLR3, TLR7, TLR8 and TLR9 recognize viral nucleic acids and induce type I IFNs. The signaling mechanisms leading to the induction of type I IFNs differ depending on the TLR activated. They involve the interferon regulatory factors, IRFs, a family of transcription factors known to play a critical role in antiviral defense, cell growth and immune regulation. Three IRFs (IRF3, IRF5 and IRF7) function as direct transducers of virus-mediated TLR signaling. TLR3 and TLR4 activate IRF3 and IRF7, while TLR7 and TLR8 activate IRF5 and IRF7 (Doyle S. et al., 2002. IRF3 mediates a TLR3/TLR4-specific antiviral gene program. Immunity. 17(3):251-63). Furthermore, type I IFN production stimulated by TLR9 ligand CpG-A has been shown to be mediated by PI(3)K and mTOR (Costa-Mattioli M. & Sonenberg N. 2008. RAPping production of type I interferon in pDCs through mTOR. Nature Immunol. 9: 1097-1099).

[0813] TLR-9

[0814] TLR9 recognizes unmethylated CpG sequences in DNA molecules. CpG sites are relatively rare (˜1%) on vertebrate genomes in comparison to bacterial genomes or viral DNA. TLR9 is expressed by numerous cells of the immune system such as B lymphocytes, monocytes, natural killer (NK) cells, and plasmacytoid dendritic cells. TLR9 is expressed intracellularly, within the endosomal compartments and functions to alert the immune system of viral and bacterial infections by binding to DNA rich in CpG motifs. TLR9 signals leads to activation of the cells initiating pro-inflammatory reactions that result in the production of cytokines such as type-I interferon and IL-12.

[0815] TLR Agonists

[0816] A TLR agonist can agonize one or more TLR, e.g., one or more of human TLR-1, 2, 3, 4, 5, 6, 7, 8, 9, or 10. In some embodiments, an adjunctive agent described herein is a TLR agonist. In some embodiments, the TLR agonist specifically agonizes human TLR-9. In some embodiments, the TLR-9 agonist is a CpG moiety. As used herein, a CpG moiety, is a linear dinucleotide having the sequence: 5′-C-phosphate-G-3′, that is, cytosine and guanine separated by only one phosphate.

[0817] In some embodiments, the CpG moiety comprises at least 1, 2, 3, 4, 5, 6, 7, 8, 9, 10, 11, 12, 13, 14, 15, 16, 17, 18, 19, 20, 21, 22, 23, 24, 25, 26, 27, 28, 29, 30, or more CpG dinucleotides. In some embodiments, the CpG moiety consists of 1, 2, 3, 4, 5, 6, 7, 8, 9, 10, 11, 12, 13, 14, 15, 16, 17, 18, 19, 20, 21, 22, 23, 24, 25, 26, 27, 28, 29, or 30 CpG dinucleotides. In some embodiments, the CpG moiety has 1-5, 1-10, 1-20, 1-30, 1-40, 1-50, 5-10, 5-20, 5-30, 10-20, 10-30, 10-40, or 10-50 CpG dinucleotides.

[0818] In some embodiments, the TLR-9 agonist is a synthetic ODN (oligodeoxynucleotides). CpG ODNs are short synthetic single-stranded DNA molecules containing unmethylated CpG dinucleotides in particular sequence contexts (CpG motifs). CpG ODNs possess a partially or completely phosphorothioated (PS) backbone, as opposed to the natural phosphodiester (PO) backbone found in genomic bacterial DNA. There are three major classes of CpG ODNs: classes A, B and C, which differ in their immunostimulatory activities. CpG-A ODNs are characterized by a PO central CpG-containing palindromic motif and a PS-modified 3′ poly-G string. They induce high IFN-α production from pDCs but are weak stimulators of TLR9-dependent NF-κB signaling and pro-inflammatory cytokine (e.g., IL-6) production. CpG-B ODNs contain a full PS backbone with one or more CpG dinucleotides. They strongly activate B cells and TLR9-dependent NF-κB signaling but weakly stimulate IFN-α secretion. CpG-C ODNs combine features of both classes A and B. They contain a complete PS backbone and a CpG-containing palindromic motif C-Class CpG ODNs induce strong IFN-α production from pDC as well as B cell stimulation.

### Stromal Modifying Moieties

[0819] Solid tumors have a distinct structure that mimics that of normal tissues and comprises two distinct but interdependent compartments: the parenchyma (neoplastic cells) and the stroma that the neoplastic cells induce and in which they are dispersed. All tumors have stroma and require stroma for nutritional support and for the removal of waste products. In the case of tumors which grow as cell suspensions (e.g., leukemias, ascites tumors), the blood plasma serves as stroma (Connolly J L et al. Tumor Structure and Tumor Stroma Generation. In: Kufe D W et al., editors. Holland-Frei Cancer Medicine. 6th edition. Hamilton: BC Decker; 2003). The stroma includes a variety of cell types, including fibroblasts/myofibroblasts, glial, epithelial, fat, vascular, smooth muscle, and immune cells along with extracellular matrix (ECM) and extracellular molecules (Li Hanchen et al. Tumor Microenvironment: The Role of the Tumor Stroma in Cancer. J of Cellular Biochemistry 101: 805-815 (2007)).

[0820] Stromal modifying moieties described herein include moieties (e.g., proteins, e.g., enzymes) capable of degrading a component of the stroma, e.g., an ECM component, e.g., a glycosaminoglycan, e.g., hyaluronan (also known as hyaluronic acid or HA), chondroitin sulfate, chondroitin, dermatan sulfate, heparin sulfate, heparin, entactin, tenascin, aggrecan and keratin sulfate; or an extracellular protein, e.g., collagen, laminin, elastin, fibrinogen, fibronectin, and vitronectin.

### Stromal Modifying Enzymes

[0821] In some embodiments, the stromal modifying moiety is an enzyme. For example, the stromal modifying moiety can include, but is not limited to a hyaluronidase, a collagenase, a chondroitinase, a matrix metalloproteinase (e.g., macrophage metalloelastase).

[0822] Hyaluronidases

[0823] Hyaluronidases are a group of neutral- and acid-active enzymes found throughout the animal kingdom. Hyaluronidases vary with respect to substrate specificity, and mechanism of action. There are three general classes of hyaluronidases: (1) Mammalian-type hyaluronidases, (EC 3.2.1.35) which are endo-beta-N-acetylhexosaminidases with tetrasaccharides and hexasaccharides as the major end products. They have both hydrolytic and transglycosidase activities, and can degrade hyaluronan and chondroitin sulfates; (2) Bacterial hyaluronidases (EC 4.2.99.1) degrade hyaluronan and, and to various extents, chondroitin sulfate and dermatan sulfate. They are endo-beta-N-acetylhexosaminidases that operate by a beta elimination reaction that yields primarily disaccharide end products; (3) Hyaluronidases (EC 3.2.1.36) from leeches, other parasites, and crustaceans are endo-beta-glucuronidases that generate tetrasaccharide and hexasaccharide end products through hydrolysis of the beta 1-3 linkage.

[0824] Mammalian hyaluronidases can be further divided into two groups: (1) neutral active and (2) acid active enzymes. There are six hyaluronidase-like genes in the human genome, HYAL1, HYAL2, HYAL3 HYAL4 HYALP1 and PH20/SPAM1. HYALP1 is a pseudogene, and HYAL3 has not been shown to possess enzyme activity toward any known substrates. HYAL4 is a chondroitinase and lacks activity towards hyaluronan. HYAL1 is the prototypical acid-active enzyme and PH20 is the prototypical neutral-active enzyme. Acid active hyaluronidases, such as HYAL1 and HYAL2 lack catalytic activity at neutral pH. For example, HYAL1 has no catalytic activity in vitro over pH 4.5 (Frost and Stern, “A Microtiter-Based Assay for Hyaluronidase Activity Not Requiring Specialized Reagents”, Analytical Biochemistry, vol. 251, pp. 263-269 (1997). HYAL2 is an acid active enzyme with a very low specific activity in vitro.

[0825] In some embodiments the hyaluronidase is a mammalian hyaluronidase. In some embodiments the hyaluronidase is a recombinant human hyaluronidase. In some embodiments, the hyaluronidase is a neutral active hyaluronidase. In some embodiments, the hyaluronidase is a neutral active soluble hyaluronidase. In some embodiments, the hyaluronidase is a recombinant PH20 neutral-active enzyme. In some embodiments, the hyaluronidase is a recombinant PH20 neutral-active soluble enzyme. In some embodiments the hyaluronidase is glycosylated. In some embodiments, the hyaluronidase possesses at least one N-linked glycan. A recombinant hyaluronidase can be produced using conventional methods known to those of skill in the art, e.g., U.S. Pat. No. 7,767,429, the entire contents of which are incorporated by reference herein.

[0826] In some embodiments the hyaluronidase is rHuPH20 (also referred to as Hylenex®; presently manufactured by Halozyme; approved by the FDA in 2005 (see e.g., Scodeller P (2014) Hyaluronidase and other Extracellular Matrix Degrading Enzymes for Cancer Therapy: New Uses and Nano-Formulations. J Carcinog Mutage 5:178; U.S. Pat. Nos. 7,767,429; 8,202,517; 7,431,380; 8,450,470; 8,772,246; 8,580,252, the entire contents of each of which is incorporated by reference herein). rHuPH20 is produced by genetically engineered CHO cells containing a DNA plasmid encoding for a soluble fragment of human hyaluronidase PH20. In some embodiments the hyaluronidase is glycosylated. In some embodiments, the hyaluronidase possesses at least one N-linked glycan. A recombinant hyaluronidase can be produced using conventional methods known to those of skill in the art, e.g., U.S. Pat. No. 7,767,429, the entire contents of which are incorporated by reference herein. In some embodiments, rHuPH20 has a sequence at least 95% (e.g., at least 96%, 97%, 98%, 99%, 100%) identical to the amino acid sequence of

(SEQ ID NO: 7248)
LNFRAPPVIPNVPFLWAWNAPSEFCLGKFDEPLDMSLFSF
IGSPRINATGQGVTIFYVDRLGYYPYIDSITGVTVNGGIP
QKISLQDHLDKAKKDITFYMPVDNLGMAVIDWEEWRPTWA
RNWKPKDVYKNRSIELVQQQNVQLSLTEATEKAKQEFEKA
GKDFLVETIKLGKLLRPNHLWGYYLFPDCYNHHYKKPGYN
GSCFNVEIKRNDDLSWLWNESTALYPSIYLNTQQSPVAAT
LYVRNRVREAIRVSKIPDAKSPLPVFAYTRIVFTDQVLKF
LSQDELVYTFGETVALGASGIVIWGTLSIMRSMKSCLLLD
NYMETILNPYIINVTLAAKMCSQVLCQEQGVCIRKNWNSS
DYLHLNPDNFAIQLEKGGKFTVRGKPTLEDLEQFSEKFYC
SCYSTLSCKEKADVKDTDAVDVCIADGVCIDAFLKPPMET
EEPQIFYNASPSTLS.

[0827] In any of the methods provided herein, the anti-hyaluronan agent can be an agent that degrades hyaluronan or can be an agent that inhibits the synthesis of hyaluronan. For example, the anti-hyaluronan agent can be a hyaluronan degrading enzyme. In another example, the anti-hyaluronan agent or is an agent that inhibits hyaluronan synthesis. For example, the anti-hyaluronan agent is an agent that inhibits hyaluronan synthesis such as a sense or antisense nucleic acid molecule against an HA synthase or is a small molecule drug. For example, an anti-hyaluronan agent is 4-methylumbelliferone (MU) or a derivative thereof, or leflunomide or a derivative thereof. Such derivatives include, for example, a derivative of 4-methylumbelliferone (MU) that is 6,7-dihydroxy-4-methyl coumarin or 5,7-dihydroxy-4-methyl coumarin.

[0828] In further examples of the methods provided herein, the hyaluronan degrading enzyme is a hyaluronidase. In some examples, the hyaluronan-degrading enzyme is a PH20 hyaluronidase or truncated form thereof to lacking a C-terminal glycosylphosphatidylinositol (GPI) attachment site or a portion of the GPI attachment site. In specific examples, the hyaluronidase is a PH20 selected from a human, monkey, bovine, ovine, rat, mouse or guinea pig PH20. For example, the hyaluronan-degrading enzyme is a human PH20 hyaluronidase that is neutral active and N-glycosylated and is selected from among (a) a hyaluronidase polypeptide that is a full-length PH20 or is a C-terminal truncated form of the PH20, wherein the truncated form includes at least amino acid residues 36-464 of SEQ ID NO: 7248, such as 36-481, 36-482, 36-483, where the full-length PH20 has the sequence of amino acids set forth in SEQ ID NO: 7248; or (b) a hyaluronidase polypeptide comprising a sequence of amino acids having at least 85%, 86%, 87%, 88%, 89%, 90%, 91%, 92%, 93%, 94%, 95%, 96%, 97%, 98%, 99% or more sequence identity with the polypeptide or truncated form of sequence of amino acids set forth in SEQ ID NO: 7248; or (c) a hyaluronidase polypeptide of (a) or (b) comprising amino acid substitutions, whereby the hyaluronidase polypeptide has a sequence of amino acids having at least 85%, 86%, 87%, 88%, 89%, 90%, 91%, 92%, 93%, 94%, 95%, 96%, 97%, 98%, 99% or more sequence identity with the polypeptide set forth in SEQ ID NO: 7248 or the with the corresponding truncated forms thereof. In exemplary examples, the hyaluronan-degrading enzyme is a PH20 that comprises a composition designated rHuPH20.

[0829] In other examples, the anti-hyaluronan agent is a hyaluronan degrading enzyme that is modified by conjugation to a polymer. The polymer can be a PEG and the anti-hyaluronan agent a PEGylated hyaluronan degrading enzyme. Hence, in some examples of the methods provided herein the hyaluronan-degrading enzyme is modified by conjugation to a polymer. For example, the hyaluronan-degrading enzyme is conjugated to a PEG, thus the hyaluronan degrading enzyme is PEGylated. In an exemplary example, the hyaluronan-degrading enzyme is a PEGylated PH20 enzyme (PEGPH20). In the methods provided herein, the corticosteroid can be a glucocorticoid that is selected from among cortisones, dexamethasones, hydrocortisones, methylprednisolones, prednisolones and prednisones.

[0830] Chondroitinases

[0831] Chondroitinases are enzymes found throughout the animal kingdom which degrade glycosaminoglycans, specifically chondroitins and chondroitin sulfates, through an endoglycosidase reaction. In some embodiments the chondroitinase is a mammalian chondroitinase. In some embodiments the chondroitinase is a recombinant human chondroitinase. In some embodiments the chondroitinase is HYAL4. Other exemplary chondroitinases include chondroitinase ABC (derived from Proteus vulgaris; Japanese Patent Application Laid-open No 6-153947, T. Yamagata et al. J. Biol. Chem., 243, 1523 (1968), S. Suzuki et al, J. Biol. Chem., 243, 1543 (1968)), chondroitinase AC (derived from Flavobacterium heparinum; T. Yamagata et al., J. Biol. Chem., 243, 1523 (1968)), chondroitinase AC II (derived from Arthrobacter aurescens; K. Hiyama, and S. Okada, J. Biol. Chem., 250, 1824 (1975), K. Hiyama and S. Okada, J. Biochem. (Tokyo), 80, 1201 (1976)), Hyaluronidase ACIII (derived from Flavobacterium sp. Hp102; Hirofumi Miyazono et al., Seikagaku, 61, 1023 (1989)), chondroitinase B (derived from Flavobacterium heparinum; Y. M. Michelacci and C. P. Dietrich, Biochem. Biophys. Res. Commun., 56, 973 (1974), Y. M. Michelacci and C. P. Dietrich, Biochem. J., 151, 121 (1975), Kenichi Maeyama et al, Seikagaku, 57, 1189 (1985)), chondroitinase C (derived from Flavobacterium sp. Hp102; Hirofumi Miyazono et al, Seikagaku, 61, 1023 (1939)), and the like.

[0832] Matrix Metalloproteinases

[0833] Matrix metalloproteases (MMPs) are zinc-dependent endopeptidases that are the major proteases involved in extracellular matrix (ECM) degradation. MMPs are capable of degrading a wide range of extracellular molecules and a number of bioactive molecules. Twenty-four MMP genes have been identified in humans, which can be organized into six groups based on domain organization and substrate preference: Collagenases (MMP-1, -8 and -13), Gelatinases (MMP-2 and MMP-9), Stromelysins (MMP-3, -10 and -11), Matrilysin (MMP-7 and MMP-26), Membrane-type (MT)-MMPs (MMP-14, -15, -16, -17, -24 and -25) and others (MMP-12, -19, -20, -21, -23, -27 and -28). In some embodiments, the stromal modifying moiety is a human recombinant MMP (e.g., MMP-1, -2, -3, -4, -5, -6, -7, -8, -9, 10, -11, -12, -13, -14, 15, -15, -17, -18, -19, 20, -21, -22, -23, or -24).

[0834] Collagenases

[0835] The three mammalian collagenases (MMP-1, -8, and -13) are the principal secreted endopeptidases capable of cleaving collagenous extracellular matrix. In addition to fibrillar collagens, collagenases can cleave several other matrix and non-matrix proteins including growth factors. Collagenases are synthesized as inactive pro-forms, and once activated, their activity is inhibited by specific tissue inhibitors of metalloproteinases, TIMPs, as well as by non-specific proteinase inhibitors (Ala-aho R et al. Biochimie. Collagenases in cancer. 2005 March-April; 87(3-4):273-86). In some embodiments, the stromal modifying moiety is a collagenase. In some embodiments, the collagenase is a human recombinant collagenase. In some embodiments, the collagenase is MMP-1. In some embodiments, the collagenase is MMP-8. In some embodiments, the collagenase is MMP-13.

[0836] Macrophage Metalloelastase

[0837] Macrophage metalloelastase (MME), also known as MMP-12, is a member of the stromelysin subgroup of MMPs and catalyzes the hydrolysis of soluble and insoluble elastin and a broad selection of matrix and nonmatrix substrates including type IV collagen, fibronectin, laminin, vitronectin, entactin, heparan, and chondroitin sulfates (Erja Kerkela et al. Journal of Investigative Dermatology (2000) 114, 1113-1119; doi: 10.1046/j.1523-1747.2000.00993). In some embodiments, the stromal modifying moiety is a MME. In some embodiments, the MME is a human recombinant MME. In some embodiments, the MME is MMP-12.

### Additional Stromal Modifying Moieties

[0838] In some embodiments, the stromal modifying moiety causes one or more of: decreases the level or production of a stromal or extracellular matrix (ECM) component; decreases tumor fibrosis; increases interstitial tumor transport; improves tumor perfusion; expands the tumor microvasculature; decreases interstitial fluid pressure (IFP) in a tumor; or decreases or enhances penetration or diffusion of an agent, e.g., a cancer therapeutic or a cellular therapy, into a tumor or tumor vasculature.

[0839] In some embodiments, the stromal or ECM component decreased is chosen from a glycosaminoglycan or an extracellular protein, or a combination thereof. In some embodiments, the glycosaminoglycan is chosen from hyaluronan (also known as hyaluronic acid or HA), chondroitin sulfate, chondroitin, dermatan sulfate, heparin, heparin sulfate, entactin, tenascin, aggrecan and keratin sulfate. In some embodiments, the extracellular protein is chosen from collagen, laminin, elastin, fibrinogen, fibronectin, or vitronectin. In some embodiments, the stromal modifying moiety includes an enzyme molecule that degrades a tumor stroma or extracellular matrix (ECM). In some embodiments, the enzyme molecule is chosen from a hyaluronidase molecule, a collagenase molecule, a chondroitinase molecule, a matrix metalloproteinase molecule (e.g., macrophage metalloelastase), or a variant (e.g., a fragment) of any of the aforesaid. The term “enzyme molecule” includes a full length, a fragment or a variant of the enzyme, e.g., an enzyme variant that retains at least one functional property of the naturally occurring enzyme.

[0840] In some embodiments, the stromal modifying moiety decreases the level or production of hyaluronic acid. In other embodiments, the stromal modifying moiety comprises a hyaluronan degrading enzyme, an agent that inhibits hyaluronan synthesis, or an antibody molecule against hyaluronic acid.

[0841] In some embodiments, the hyaluronan degrading enzyme is a hyaluronidase molecule, e.g., a full length or a variant (e.g., fragment thereof) thereof. In some embodiments, the hyaluronan degrading enzyme is active in neutral or acidic pH, e.g., pH of about 4-5. In some embodiments, the hyaluronidase molecule is a mammalian hyaluronidase molecule, e.g., a recombinant human hyaluronidase molecule, e.g., a full length or a variant (e.g., fragment thereof, e.g., a truncated form) thereof. In some embodiments, the hyaluronidase molecule is chosen from HYAL1, HYAL2, or PH-20/SPAM1, or a variant thereof (e.g., a truncated form thereof). In some embodiments, the truncated form lacks a C-terminal glycosylphosphatidylinositol (GPI) attachment site or a portion of the GPI attachment site. In some embodiments, the hyaluronidase molecule is glycosylated, e.g., comprises at least one N-linked glycan.

[0842] In some embodiments, the hyaluronidase molecule comprises the amino acid sequence: LNFRAPPVIPNVPFLWAWNAPSEFCLGKFDEPLDMSLFSFIGSPRINATGQGVTIFYVDRLGYY PYIDSITGVTVNGGIPQKISLQDHLDKAKKDITFYMPVDNLGMAVIDWEEWRPTWARNWKP KDVYKNRSIELVQQQNVQLSLTEATEKAKQEFEKAGKDFLVETIKLGKLLRPNHLWGYYLFP DCYNHHYKKPGYNGSCFNVEIKRNDDLSWLWNESTALYPSIYLNTQQSPVAATLYVRNRVR EAIRVSKIPDAKSPLPVFAYTRIVFTDQVLKFLSQDELVYTFGETVALGASGIVIWGTLSIMRS MKSCLLLDNYMETILNPYIINVTLAAKMCSQVLCQEQGVCIRKNWNSSDYLHLNPDNFAIQL EKGGKFTVRGKPTLEDLEQFSEKFYCSCYSTLSCKEKADVKDTDAVDVCIADGVCIDAFLKP PMETEEPQIFYNASPSTLS (SEQ ID NO: 7256), or a fragment thereof, or an amino acid sequence substantially identical thereto (e.g., 95% to 99.9% identical thereto, or having at least one amino acid alteration, but not more than five, ten or fifteen alterations (e.g., substitutions, deletions, or insertions, e.g., conservative substitutions) to the amino acid sequence of SEQ ID NO: 7256.

[0843] In some embodiments, the hyaluronidase molecule comprises:
[0844] (i) the amino acid sequence of 36-464 of SEQ ID NO: 7256;
[0845] (ii) the amino acid sequence of 36-481, 36-482, or 36-483 of PH20, wherein PH20 has the sequence of amino acids set forth in SEQ ID NO: 7256; or
[0846] (iii) an amino acid sequence having at least 95% to 100% sequence identity to the polypeptide or truncated form of sequence of amino acids set forth in SEQ ID NO: 7256; or
[0847] (iv) an amino acid sequence having 30, 20, 10, 5 or fewer amino acid substitutions to the amino acid sequence set forth in SEQ ID NO: 7256. In some embodiments, the hyaluronidase molecule comprises an amino acid sequence at least 95% (e.g., at least 95%, 96%, 97%, 98%, 99%, 100%) identical to the amino acid sequence of SEQ ID NO: 7256. In some embodiments, the hyaluronidase molecule is encoded by a nucleotide sequence at least 95% (e.g., at least 96%, 97%, 98%, 99%, 100%) identical to the nucleotide sequence of SEQ ID NO: 7256.

[0848] In some embodiments, the hyaluronidase molecule is PH20, e.g., rHuPH20. In some embodiments, the hyaluronidase molecule is HYAL1 and comprises the amino acid sequence:

(SEQ ID NO: 7253)
FRGPLLPNRPFTTVWNANTQWCLERHGVDVDVSVFDVVAN
PGQTFRGPDMTIFYSSQGTYPYYTPTGEPVFGGLPQNASL
IAHLARTFQDILAAIPAPDFSGLAVIDWEAWRPRWAFNWD
TKDIYRQRSRALVQAQHPDWPAPQVEAVAQDQFQGAARAW
MAGTLQLGRALRPRGLWGFYGFPDCYNYDFLSPNYTGQCP
SGIRAQNDQLGWLWGQSRALYPSIYMPAVLEGTGKSQMYV
QHNTRTKESCQAIKEYMDTTLGPFILNVTSGALLCSQALC
SGHGRCVRRTSHPKALLLLNPASFSIQLTPGGGPLSLRGA
LSLEDQAQMAVEFKCRCYPGWQAPWCERKSMW,

or a fragment thereof, or an amino acid sequence substantially identical thereto (e.g., 95% to 99.9% identical thereto, or having at least one amino acid alteration, but not more than five, ten or fifteen alterations (e.g., substitutions, deletions, or insertions, e.g., conservative substitutions) to the amino acid sequence of SEQ ID NO: 7253.

[0849] In some embodiments, the hyaluronan degrading enzyme, e.g., the hyaluronidase molecule, further comprises a polymer, e.g., is conjugated to a polymer, e.g., PEG. In some embodiments, the hyaluronan-degrading enzyme is a PEGylated PH20 enzyme (PEGPH20). In some embodiments, the hyaluronan degrading enzyme, e.g., the hyaluronidase molecule, further comprises an immunoglobulin chain constant region (e.g., Fc region) chosen from, e.g., the heavy chain constant regions of IgG1, IgG2, IgG3, and IgG4, more particularly, the heavy chain constant region of human IgG1, IgG2, IgG3, or IgG4. In some embodiments, the immunoglobulin constant region (e.g., the Fc region) is linked, e.g., covalently linked to, the hyaluronan degrading enzyme, e.g., the hyaluronidase molecule. In some embodiments, the immunoglobulin chain constant region (e.g., Fc region) is altered, e.g., mutated, to increase or decrease one or more of: Fc receptor binding, antibody glycosylation, the number of cysteine residues, effector cell function, or complement function. In some embodiments, the hyaluronan degrading enzyme, e.g., the hyaluronidase molecule forms a dimer.

[0850] In some embodiments, the stromal modifying moiety comprises an inhibitor of the synthesis of hyaluronan, e.g., an HA synthase. In some embodiments, the inhibitor comprises a sense or an antisense nucleic acid molecule against an HA synthase or is a small molecule drug. In some embodiments, the inhibitor is 4-methylumbelliferone (MU) or a derivative thereof (e.g., 6,7-dihydroxy-4-methyl coumarin or 5,7-dihydroxy-4-methyl coumarin), or leflunomide or a derivative thereof.

[0851] In some embodiments, the stromal modifying moiety comprises antibody molecule against hyaluronic acid.

[0852] In some embodiments, the stromal modifying moiety comprises a collagenase molecule, e.g., a mammalian collagenase molecule, or a variant (e.g., fragment) thereof. In some embodiments, the collagenase molecule is collagenase molecule IV, e.g., comprising the amino acid sequence of: YNFFPRKPKWDKNQITYRIIGYTPDLDPETVDDAFARAFQVWSDVTPLRFSRIHDGEADIMIN FGRWEHGDGYPFDGKDGLLAHAFAPGTGVGGDSHFDDDELWTLGEGQVVRVKYGNADGE YCKFPFLFNGKEYNSCTDTGRSDGFLWCSTTYNFEKDGKYGFCPHEALFTMGGNAEGQPCK FPFRFQGTSYDSCTTEGRTDGYRWCGTTEDYDRDKKYGFCPETAMSTVGGNSEGAPCVFPFT FLGNKYESCTSAGRSDGKMWCATTANYDDDRKWGFCPDQGYSLFLVAAHEFGHAMGLEH SQDPGALMAPIYTYTKNFRLSQDDIKGIQELYGASPDIDLGTGPTPTLGPVTPEICKQDIVFDGI AQIRGEIFFFKDRFIWRTVTPRDKPMGPLLVATFWPELPEKIDAVYEAPQEEKAVFFAGNEYW IYSASTLERGYPKPLTSLGLPPDVQRVDAAFNWSKNKKTYIFAGDKFWRYNEVKKKMDPGF PKLIADAWNAIPDNLDAVVDLQGGGHSYFFKGAYYLKLENQSLKSVKFGSIKSDWLGC (SEQ ID NO: 7254), or a fragment thereof, or an amino acid sequence substantially identical thereto (e.g., 95% to 99.9% identical thereto, or having at least one amino acid alteration, but not more than five, ten or fifteen alterations (e.g., substitutions, deletions, or insertions, e.g., conservative substitutions) to the amino acid sequence of SEQ ID NO: 7254.

### Linkers

[0853] The multispecific or multifunctional molecule disclosed herein can further include a linker, e.g., a linker between one or more of: the antigen binding domain and the cytokine molecule, the antigen binding domain and the immune cell engager, the antigen binding domain and the stromal modifying moiety, the cytokine molecule and the immune cell engager, the cytokine molecule and the stromal modifying moiety, the immune cell engager and the stromal modifying moiety, the antigen binding domain and the immunoglobulin chain constant region, the cytokine molecule and the immunoglobulin chain constant region, the immune cell engager and the immunoglobulin chain constant region, or the stromal modifying moiety and the immunoglobulin chain constant region. In embodiments, the linker is chosen from: a cleavable linker, a non-cleavable linker, a peptide linker, a flexible linker, a rigid linker, a helical linker, or a non-helical linker, or a combination thereof.

[0854] In one embodiment, the multispecific molecule can include one, two, three or four linkers, e.g., a peptide linker. In one embodiment, the peptide linker includes Gly and Ser. In some embodiments, the peptide linker is selected from GGGGS (SEQ ID NO: 7249); GGGGSGGGGS (SEQ ID NO: 7250); GGGGSGGGGSGGGGS (SEQ ID NO: 7251); and DVPSGPGGGGGSGGGGS (SEQ ID NO: 7252). In some embodiments, the peptide linker is a A(EAAAK)nA (SEQ ID NO: 7255) family of linkers (e.g., as described in Protein Eng. (2001) 14 (8): 529-532). These are stiff helical linkers with n ranging from 2-5. In some embodiments, the peptide linker is selected from

(SEQ ID NO: 75)
AEAAAKEAAAKAAA;
(SEQ ID NO: 76)
AEAAAKEAAAKEAAAKAAA;
(SEQ ID NO: 77)
AEAAAKEAAAKEAAAKEAAAKAAA;
and
(SEQ ID NO: 78)
AEAAAKEAAAKEAAAKEAAAKEAAAKAAA.

### Nucleic Acids

[0855] Nucleic acids encoding the aforementioned multispecific or multifunctional molecules are also disclosed.

[0856] In certain embodiments, the invention features nucleic acids comprising nucleotide sequences that encode heavy and light chain variable regions and CDRs or hypervariable loops of the antibody molecules, as described herein. For example, the invention features a first and second nucleic acid encoding heavy and light chain variable regions, respectively, of an antibody molecule chosen from one or more of the antibody molecules disclosed herein. The nucleic acid can comprise a nucleotide sequence as set forth in the tables herein, or a sequence substantially identical thereto (e.g., a sequence at least about 85%, 90%, 95%, 99% or more identical thereto, or which differs by no more than 3, 6, 15, 30, or 45 nucleotides from the sequences shown in the tables herein.

[0857] In certain embodiments, the nucleic acid can comprise a nucleotide sequence encoding at least one, two, or three CDRs or hypervariable loops from a heavy chain variable region having an amino acid sequence as set forth in the tables herein, or a sequence substantially homologous thereto (e.g., a sequence at least about 85%, 90%, 95%, 99% or more identical thereto, and/or having one or more substitutions, e.g., conserved substitutions). In other embodiments, the nucleic acid can comprise a nucleotide sequence encoding at least one, two, or three CDRs or hypervariable loops from a light chain variable region having an amino acid sequence as set forth in the tables herein, or a sequence substantially homologous thereto (e.g., a sequence at least about 85%, 90%, 95%, 99% or more identical thereto, and/or having one or more substitutions, e.g., conserved substitutions). In yet another embodiment, the nucleic acid can comprise a nucleotide sequence encoding at least one, two, three, four, five, or six CDRs or hypervariable loops from heavy and light chain variable regions having an amino acid sequence as set forth in the tables herein, or a sequence substantially homologous thereto (e.g., a sequence at least about 85%, 90%, 95%, 99% or more identical thereto, and/or having one or more substitutions, e.g., conserved substitutions).

[0858] In certain embodiments, the nucleic acid can comprise a nucleotide sequence encoding at least one, two, or three CDRs or hypervariable loops from a heavy chain variable region having the nucleotide sequence as set forth in the tables herein, a sequence substantially homologous thereto (e.g., a sequence at least about 85%, 90%, 95%, 99% or more identical thereto, and/or capable of hybridizing under the stringency conditions described herein). In another embodiment, the nucleic acid can comprise a nucleotide sequence encoding at least one, two, or three CDRs or hypervariable loops from a light chain variable region having the nucleotide sequence as set forth in the tables herein, or a sequence substantially homologous thereto (e.g., a sequence at least about 85%, 90%, 95%, 99% or more identical thereto, and/or capable of hybridizing under the stringency conditions described herein). In yet another embodiment, the nucleic acid can comprise a nucleotide sequence encoding at least one, two, three, four, five, or six CDRs or hypervariable loops from heavy and light chain variable regions having the nucleotide sequence as set forth in the tables herein, or a sequence substantially homologous thereto (e.g., a sequence at least about 85%, 90%, 95%, 99% or more identical thereto, and/or capable of hybridizing under the stringency conditions described herein).

[0859] In certain embodiments, the nucleic acid can comprise a nucleotide sequence encoding a cytokine molecule, an immune cell engager, or a stromal modifying moiety disclosed herein.

[0860] In another aspect, the application features host cells and vectors containing the nucleic acids described herein. The nucleic acids may be present in a single vector or separate vectors present in the same host cell or separate host cell, as described in more detail hereinbelow.

### Vectors

[0861] Further provided herein are vectors comprising the nucleotide sequences encoding a multispecific or multifunctional molecule described herein. In one embodiment, the vectors comprise nucleotides encoding a multispecific or multifunctional molecule described herein. In one embodiment, the vectors comprise the nucleotide sequences described herein. The vectors include, but are not limited to, a virus, plasmid, cosmid, lambda phage or a yeast artificial chromosome (YAC).

[0862] Numerous vector systems can be employed. For example, one class of vectors utilizes DNA elements which are derived from animal viruses such as, for example, bovine papilloma virus, polyoma virus, adenovirus, vaccinia virus, baculovirus, retroviruses (Rous Sarcoma Virus, MMTV or MOMLV) or SV40 virus. Another class of vectors utilizes RNA elements derived from RNA viruses such as Semliki Forest virus, Eastern Equine Encephalitis virus and Flaviviruses.

[0863] Additionally, cells which have stably integrated the DNA into their chromosomes may be selected by introducing one or more markers which allow for the selection of transfected host cells. The marker may provide, for example, prototropy to an auxotrophic host, biocide resistance (e.g., antibiotics), or resistance to heavy metals such as copper, or the like. The selectable marker gene can be either directly linked to the DNA sequences to be expressed, or introduced into the same cell by cotransformation. Additional elements may also be needed for optimal synthesis of mRNA. These elements may include splice signals, as well as transcriptional promoters, enhancers, and termination signals.

[0864] Once the expression vector or DNA sequence containing the constructs has been prepared for expression, the expression vectors may be transfected or introduced into an appropriate host cell. Various techniques may be employed to achieve this, such as, for example, protoplast fusion, calcium phosphate precipitation, electroporation, retroviral transduction, viral transfection, gene gun, lipid based transfection or other conventional techniques. In the case of protoplast fusion, the cells are grown in media and screened for the appropriate activity. Methods and conditions for culturing the resulting transfected cells and for recovering the antibody molecule produced are known to those skilled in the art, and may be varied or optimized depending upon the specific expression vector and mammalian host cell employed, based upon the present description.

### Cells

[0865] In another aspect, the application features host cells and vectors containing the nucleic acids described herein. The nucleic acids may be present in a single vector or separate vectors present in the same host cell or separate host cell. The host cell can be a eukaryotic cell, e.g., a mammalian cell, an insect cell, a yeast cell, or a prokaryotic cell, e.g., E. coli. For example, the mammalian cell can be a cultured cell or a cell line. Exemplary mammalian cells include lymphocytic cell lines (e.g., NSO), Chinese hamster ovary cells (CHO), COS cells, oocyte cells, and cells from a transgenic animal, e.g., mammary epithelial cell.

[0866] The invention also provides host cells comprising a nucleic acid encoding an antibody molecule as described herein.

[0867] In one embodiment, the host cells are genetically engineered to comprise nucleic acids encoding the antibody molecule.

[0868] In one embodiment, the host cells are genetically engineered by using an expression cassette. The phrase “expression cassette,” refers to nucleotide sequences, which are capable of affecting expression of a gene in hosts compatible with such sequences. Such cassettes may include a promoter, an open reading frame with or without introns, and a termination signal. Additional factors necessary or helpful in effecting expression may also be used, such as, for example, an inducible promoter.

[0869] The invention also provides host cells comprising the vectors described herein.

[0870] The cell can be, but is not limited to, a eukaryotic cell, a bacterial cell, an insect cell, or a human cell. Suitable eukaryotic cells include, but are not limited to, Vero cells, HeLa cells, COS cells, CHO cells, HEK293 cells, BHK cells and MDCKII cells. Suitable insect cells include, but are not limited to, Sf9 cells.

### Uses and Combination Therapies

[0871] Methods described herein include treating a cancer in a subject by using a multispecific molecule described herein, e.g., using a pharmaceutical composition described herein. Also provided are methods for reducing or ameliorating a symptom of a cancer in a subject, as well as methods for inhibiting the growth of a cancer and/or killing one or more cancer cells. In embodiments, the methods described herein decrease the size of a tumor and/or decrease the number of cancer cells in a subject administered with a described herein or a pharmaceutical composition described herein.

[0872] In embodiments, the cancer is a hematological cancer. In embodiments, the hematological cancer is a leukemia or a lymphoma. As used herein, a “hematologic cancer” refers to a tumor of the hematopoietic or lymphoid tissues, e.g., a tumor that affects blood, bone marrow, or lymph nodes. Exemplary hematologic malignancies include, but are not limited to, leukemia (e.g., acute lymphoblastic leukemia (ALL), acute myeloid leukemia (AML), chronic lymphocytic leukemia (CLL), chronic myelogenous leukemia (CML), hairy cell leukemia, acute monocytic leukemia (AMoL), chronic myelomonocytic leukemia (CMML), juvenile myelomonocytic leukemia (JMML), or large granular lymphocytic leukemia), lymphoma (e.g., AIDS-related lymphoma, cutaneous T-cell lymphoma, Hodgkin lymphoma (e.g., classical Hodgkin lymphoma or nodular lymphocyte-predominant Hodgkin lymphoma), mycosis fungoides, non-Hodgkin lymphoma (e.g., B-cell non-Hodgkin lymphoma (e.g., Burkitt lymphoma, small lymphocytic lymphoma (CLL/SLL), diffuse large B-cell lymphoma, follicular lymphoma, immunoblastic large cell lymphoma, precursor B-lymphoblastic lymphoma, or mantle cell lymphoma) or T-cell non-Hodgkin lymphoma (mycosis fungoides, anaplastic large cell lymphoma, or precursor T-lymphoblastic lymphoma)), primary central nervous system lymphoma, Sézary syndrome, Waldenström macroglobulinemia), chronic myeloproliferative neoplasm, Langerhans cell histiocytosis, multiple myeloma/plasma cell neoplasm, myelodysplastic syndrome, or myelodysplastic/myeloproliferative neoplasm.

[0873] In embodiments, the cancer is a solid cancer. Exemplary solid cancers include, but are not limited to, ovarian cancer, rectal cancer, stomach cancer, testicular cancer, cancer of the anal region, uterine cancer, colon cancer, rectal cancer, renal-cell carcinoma, liver cancer, non-small cell carcinoma of the lung, cancer of the small intestine, cancer of the esophagus, melanoma, Kaposi's sarcoma, cancer of the endocrine system, cancer of the thyroid gland, cancer of the parathyroid gland, cancer of the adrenal gland, bone cancer, pancreatic cancer, skin cancer, cancer of the head or neck, cutaneous or intraocular malignant melanoma, uterine cancer, brain stem glioma, pituitary adenoma, epidermoid cancer, carcinoma of the cervix squamous cell cancer, carcinoma of the fallopian tubes, carcinoma of the endometrium, carcinoma of the vagina, sarcoma of soft tissue, cancer of the urethra, carcinoma of the vulva, cancer of the penis, cancer of the bladder, cancer of the kidney or ureter, carcinoma of the renal pelvis, spinal axis tumor, neoplasm of the central nervous system (CNS), primary CNS lymphoma, tumor angiogenesis, metastatic lesions of said cancers, or combinations thereof.

[0874] In certain embodiments, the cancer is an epithelial, mesenchymal or hematologic malignancy. In certain embodiments, the cancer treated is a solid tumor (e.g., carcinoid, carcinoma or sarcoma), a soft tissue tumor (e.g., a heme malignancy), and a metastatic lesion, e.g., a metastatic lesion of any of the cancers disclosed herein. In one embodiment, the cancer treated is a fibrotic or desmoplastic solid tumor, e.g., a tumor having one or more of: limited tumor perfusion, compressed blood vessels, fibrotic tumor interstitium, or increased interstitial fluid pressure. In one embodiment, the solid tumor is chosen from one or more of pancreatic (e.g., pancreatic adenocarcinoma or pancreatic ductal adenocarcinoma), breast, colon, colorectal, lung (e.g., small cell lung cancer (SCLC) or non-small cell lung cancer (NSCLC)), skin, ovarian, liver cancer, esophageal cancer, endometrial cancer, gastric cancer, head and neck cancer, kidney, or prostate cancer.

[0875] Examples of cancer include, but are not limited to, carcinoma, lymphoma, blastoma, sarcoma, and leukemia or lymphoid malignancies. More particular examples of such cancers are noted below and include: squamous cell cancer (e.g. epithelial squamous cell cancer), lung cancer including small-cell lung cancer, non-small cell lung cancer, adenocarcinoma of the lung and squamous carcinoma of the lung, cancer of the peritoneum, hepatocellular cancer, gastric or stomach cancer including gastrointestinal cancer, pancreatic cancer, glioblastoma, cervical cancer, ovarian cancer, liver cancer, bladder cancer, hepatoma, breast cancer, colon cancer, rectal cancer, colorectal cancer, endometrial cancer or uterine carcinoma, salivary gland carcinoma, kidney or renal cancer, prostate cancer, vulval cancer, thyroid cancer, hepatic carcinoma, anal carcinoma, penile carcinoma, as well as head and neck cancer. The term “cancer” includes primary malignant cells or tumors (e.g., those whose cells have not migrated to sites in the subject's body other than the site of the original malignancy or tumor) and secondary malignant cells or tumors (e.g., those arising from metastasis, the migration of malignant cells or tumor cells to secondary sites that are different from the site of the original tumor).

[0876] Other examples of cancers or malignancies include, but are not limited to: Acute Childhood Lymphoblastic Leukemia, Acute Lymphoblastic Leukemia, Acute Lymphocytic Leukemia, Acute Myeloid Leukemia, Adrenocortical Carcinoma, Adult (Primary) Hepatocellular Cancer, Adult (Primary) Liver Cancer, Adult Acute Lymphocytic Leukemia, Adult Acute Myeloid Leukemia, Adult Hodgkin's Disease, Adult Hodgkin's Lymphoma, Adult Lymphocytic Leukemia, Adult Non-Hodgkin's Lymphoma, Adult Primary Liver Cancer, Adult Soft Tissue Sarcoma, AIDS-Related Lymphoma, AIDS-Related Malignancies, Anal Cancer, Astrocytoma, Bile Duct Cancer, Bladder Cancer, Bone Cancer, Brain Stem Glioma, Brain Tumors, Breast Cancer, Cancer of the Renal Pelvis and Ureter, Central Nervous System (Primary) Lymphoma, Central Nervous System Lymphoma, Cerebellar Astrocytoma, Cerebral Astrocytoma, Cervical Cancer, Childhood (Primary) Hepatocellular Cancer, Childhood (Primary) Liver Cancer, Childhood Acute Lymphoblastic Leukemia, Childhood Acute Myeloid Leukemia, Childhood Brain Stem Glioma, Childhood Cerebellar Astrocytoma, Childhood Cerebral Astrocytoma, Childhood Extracranial Germ Cell Tumors, Childhood Hodgkin's Disease, Childhood Hodgkin's Lymphoma, Childhood Hypothalamic and Visual Pathway Glioma, Childhood Lymphoblastic Leukemia, Childhood Medulloblastoma, Childhood Non-Hodgkin's Lymphoma, Childhood Pineal and Supratentorial Primitive Neuroectodermal Tumors, Childhood Primary Liver Cancer, Childhood Rhabdomyosarcoma, Childhood Soft Tissue Sarcoma, Childhood Visual Pathway and Hypothalamic Glioma, Chronic Lymphocytic Leukemia, Chronic Myelogenous Leukemia, Colon Cancer, Cutaneous T-Cell Lymphoma, Endocrine Pancreas Islet Cell Carcinoma, Endometrial Cancer, Ependymoma, Epithelial Cancer, Esophageal Cancer, Ewing's Sarcoma and Related Tumors, Exocrine Pancreatic Cancer, Extracranial Germ Cell Tumor, Extragonadal Germ Cell Tumor, Extrahepatic Bile Duct Cancer, Eye Cancer, Female Breast Cancer, Gaucher's Disease, Gallbladder Cancer, Gastric Cancer, Gastrointestinal Carcinoid Tumor, Gastrointestinal Tumors, Germ Cell Tumors, Gestational Trophoblastic Tumor, Hairy Cell Leukemia, Head and Neck Cancer, Hepatocellular Cancer, Hodgkin's Disease, Hodgkin's Lymphoma, Hypergammaglobulinemia, Hypopharyngeal Cancer, Intestinal Cancers, Intraocular Melanoma, Islet Cell Carcinoma, Islet Cell Pancreatic Cancer, Kaposi's Sarcoma, Kidney Cancer, Laryngeal Cancer, Lip and Oral Cavity Cancer, Liver Cancer, Lung Cancer, Lymphoproliferative Disorders, Macroglobulinemia, Male Breast Cancer, Malignant Mesothelioma, Malignant Thymoma, Medulloblastoma, Melanoma, Mesothelioma, Metastatic Occult Primary Squamous Neck Cancer, Metastatic Primary Squamous Neck Cancer, Metastatic Squamous Neck Cancer, Multiple Myeloma, Multiple Myeloma/Plasma Cell Neoplasm, Myelodysplastic Syndrome, Myelogenous Leukemia, Myeloid Leukemia, Myeloproliferative Disorders, Nasal Cavity and Paranasal Sinus Cancer, Nasopharyngeal Cancer, Neuroblastoma, Non-Hodgkin's Lymphoma During Pregnancy, Nonmelanoma Skin Cancer, Non-Small Cell Lung Cancer, Occult Primary Metastatic Squamous Neck Cancer, Oropharyngeal Cancer, Osteo-/Malignant Fibrous Sarcoma, Osteosarcoma/Malignant Fibrous Histiocytoma, Osteosarcoma/Malignant Fibrous Histiocytoma of Bone, Ovarian Epithelial Cancer, Ovarian Germ Cell Tumor, Ovarian Low Malignant Potential Tumor, Pancreatic Cancer, Paraproteinemias, Purpura, Parathyroid Cancer, Penile Cancer, Pheochromocytoma, Pituitary Tumor, Plasma Cell Neoplasm/Multiple Myeloma, Primary Central Nervous System Lymphoma, Primary Liver Cancer, Prostate Cancer, Rectal Cancer, Renal Cell Cancer, Renal Pelvis and Ureter Cancer, Retinoblastoma, Rhabdomyosarcoma, Salivary Gland Cancer, Sarcoidosis Sarcomas, Sezary Syndrome, Skin Cancer, Small Cell Lung Cancer, Small Intestine Cancer, Soft Tissue Sarcoma, Squamous Neck Cancer, Stomach Cancer, Supratentorial Primitive Neuroectodermal and Pineal Tumors, T-Cell Lymphoma, Testicular Cancer, Thymoma, Thyroid Cancer, Transitional Cell Cancer of the Renal Pelvis and Ureter, Transitional Renal Pelvis and Ureter Cancer, Trophoblastic Tumors, Ureter and Renal Pelvis Cell Cancer, Urethral Cancer, Uterine Cancer, Uterine Sarcoma, Vaginal Cancer, Visual Pathway and Hypothalamic Glioma, Vulvar Cancer, Waldenstrom's Macroglobulinemia, Wilms' Tumor, and any other hyperproliferative disease, besides neoplasia, located in an organ system listed above.

[0877] In other embodiments, the multispecific molecule, as described above and herein, is used to treat a hyperproliferative disorder, e.g., a hyperproliferative connective tissue disorder (e.g., a hyperproliferative fibrotic disease). In one embodiment, the hyperproliferative fibrotic disease is multisystemic or organ-specific. Exemplary hyperproliferative fibrotic diseases include, but are not limited to, multisystemic (e.g., systemic sclerosis, multifocal fibrosclerosis, sclerodermatous graft-versus-host disease in bone marrow transplant recipients, nephrogenic systemic fibrosis, scleroderma), and organ-specific disorders (e.g., fibrosis of the eye, lung, liver, heart, kidney, pancreas, skin and other organs). In other embodiments, the disorder is chosen from liver cirrhosis or tuberculosis. In other embodiments, the disorder is leprosy.

[0878] In embodiments, the multispecific molecules (or pharmaceutical composition) are administered in a manner appropriate to the disease to be treated or prevented. The quantity and frequency of administration will be determined by such factors as the condition of the patient, and the type and severity of the patient's disease. Appropriate dosages may be determined by clinical trials. For example, when “an effective amount” or “a therapeutic amount” is indicated, the precise amount of the pharmaceutical composition (or multispecific molecules) to be administered can be determined by a physician with consideration of individual differences in tumor size, extent of infection or metastasis, age, weight, and condition of the subject. In embodiments, the pharmaceutical composition described herein can be administered at a dosage of 10⁴ to 10⁹ cells/kg body weight, e.g., 10⁵ to 10⁶ cells/kg body weight, including all integer values within those ranges. In embodiments, the pharmaceutical composition described herein can be administered multiple times at these dosages. In embodiments, the pharmaceutical composition described herein can be administered using infusion techniques described in immunotherapy (see, e.g., Rosenberg et al., New Eng. J. of Med. 319:1676, 1988).

[0879] In embodiments, the cancer is a myeloproliferative neoplasm, e.g., primary or idiopathic myelofibrosis (MF), essential thrombocytosis (ET), polycythemia vera (PV), or chronic myelogenous leukemia (CML). In embodiments, the cancer is myelofibrosis. In embodiments, the subject has myelofibrosis. In embodiments, the subject has a calreticulin mutation, e.g., a calreticulin mutation disclosed herein. In embodiments, the subject does not have the JAK2-V617F mutation. In embodiments, the subject has the JAK2-V617F mutation. In embodiments, the subject has a MPL mutation. In embodiments, the subject does not have a MPL mutation.

[0880] In embodiments, the cancer is a solid cancer. Exemplary solid cancers include, but are not limited to, ovarian cancer, rectal cancer, stomach cancer, testicular cancer, cancer of the anal region, uterine cancer, colon cancer, rectal cancer, renal-cell carcinoma, liver cancer, non-small cell carcinoma of the lung, cancer of the small intestine, cancer of the esophagus, melanoma, Kaposi's sarcoma, cancer of the endocrine system, cancer of the thyroid gland, cancer of the parathyroid gland, cancer of the adrenal gland, bone cancer, pancreatic cancer, skin cancer, cancer of the head or neck, cutaneous or intraocular malignant melanoma, uterine cancer, brain stem glioma, pituitary adenoma, epidermoid cancer, carcinoma of the cervix squamous cell cancer, carcinoma of the fallopian tubes, carcinoma of the endometrium, carcinoma of the vagina, sarcoma of soft tissue, cancer of the urethra, carcinoma of the vulva, cancer of the penis, cancer of the bladder, cancer of the kidney or ureter, carcinoma of the renal pelvis, spinal axis tumor, neoplasm of the central nervous system (CNS), primary CNS lymphoma, tumor angiogenesis, metastatic lesions of said cancers, or combinations thereof.

[0881] In embodiments, the multispecific molecules or pharmaceutical composition is administered to the subject parenterally. In embodiments, the cells are administered to the subject intravenously, subcutaneously, intratumorally, intranodally, intramuscularly, intradermally, or intraperitoneally. In embodiments, the cells are administered, e.g., injected, directly into a tumor or lymph node. In embodiments, the cells are administered as an infusion (e.g., as described in Rosenberg et al., New Eng. J. of Med. 319:1676, 1988) or an intravenous push. In embodiments, the cells are administered as an injectable depot formulation.

[0882] In embodiments, the subject is a mammal. In embodiments, the subject is a human, monkey, pig, dog, cat, cow, sheep, goat, rabbit, rat, or mouse. In embodiments, the subject is a human. In embodiments, the subject is a pediatric subject, e.g., less than 18 years of age, e.g., less than 17, 16, 15, 14, 13, 12, 11, 10, 9, 8, 7, 6, 5, 4, 3, 2, 1 or less years of age. In embodiments, the subject is an adult, e.g., at least 18 years of age, e.g., at least 19, 20, 21, 22, 23, 24, 25, 25-30, 30-35, 35-40, 40-50, 50-60, 60-70, 70-80, or 80-90 years of age.

### Combination Therapies

[0883] The multispecific or multifunctional molecules disclosed herein can be used in combination with a second therapeutic agent or procedure.

[0884] In embodiments, the multispecific or multifunctional molecule and the second therapeutic agent or procedure are administered/performed after a subject has been diagnosed with a cancer, e.g., before the cancer has been eliminated from the subject. In embodiments, the multispecific or multifunctional molecule and the second therapeutic agent or procedure are administered/performed simultaneously or concurrently. For example, the delivery of one treatment is still occurring when the delivery of the second commences, e.g., there is an overlap in administration of the treatments. In other embodiments, the multispecific or multifunctional molecule and the second therapeutic agent or procedure are administered/performed sequentially. For example, the delivery of one treatment ceases before the delivery of the other treatment begins.

[0885] In embodiments, combination therapy can lead to more effective treatment than monotherapy with either agent alone. In embodiments, the combination of the first and second treatment is more effective (e.g., leads to a greater reduction in symptoms and/or cancer cells) than the first or second treatment alone. In embodiments, the combination therapy permits use of a lower dose of the first or the second treatment compared to the dose of the first or second treatment normally required to achieve similar effects when administered as a monotherapy. In embodiments, the combination therapy has a partially additive effect, wholly additive effect, or greater than additive effect.

[0886] In one embodiment, the multispecific or multifunctional molecule is administered in combination with a therapy, e.g., a cancer therapy (e.g., one or more of anti-cancer agents, immunotherapy, photodynamic therapy (PDT), surgery and/or radiation). The terms “chemotherapeutic,” “chemotherapeutic agent,” and “anti-cancer agent” are used interchangeably herein. The administration of the multispecific or multifunctional molecule and the therapy, e.g., the cancer therapy, can be sequential (with or without overlap) or simultaneous. Administration of the multispecific or multifunctional molecule can be continuous or intermittent during the course of therapy (e.g., cancer therapy). Certain therapies described herein can be used to treat cancers and non-cancerous diseases. For example, PDT efficacy can be enhanced in cancerous and non-cancerous conditions (e.g., tuberculosis) using the methods and compositions described herein (reviewed in, e.g., Agostinis, P. et al. (2011) CA Cancer J Clin. 61:250-281).

### Anti-Cancer Therapies

[0887] In other embodiments, the multispecific or multifunctional molecule is administered in combination with a low or small molecular weight chemotherapeutic agent. Exemplary low or small molecular weight chemotherapeutic agents include, but not limited to, 13-cis-retinoic acid (isotretinoin, ACCUTANE®), 2-CdA (2-chlorodeoxyadenosine, cladribine, LEUSTATIN™), 5-azacitidine (azacitidine, VIDAZA®), 5-fluorouracil (5-FU, fluorouracil, ADRUCIL®), 6-mercaptopurine (6-MP, mercaptopurine, PURINETHOL®), 6-TG (6-thioguanine, thioguanine, THIOGUANINE TABLOID®), abraxane (paclitaxel protein-bound), actinomycin-D (dactinomycin, COSMEGEN®), alitretinoin (PANRETIN®), all-transretinoic acid (ATRA, tretinoin, VESANOID®), altretamine (hexamethylmelamine, HMM, HEXALEN®), amethopterin (methotrexate, methotrexate sodium, MTX, TREXALL™, RHEUMATREX®), amifostine (ETHYOL®), arabinosylcytosine (Ara-C, cytarabine, CYTOSAR-U®), arsenic trioxide (TRISENOX®), asparaginase (Erwinia L-asparaginase, L-asparaginase, ELSPAR®, KIDROLASE®), BCNU (carmustine, BiCNU®), bendamustine (TREANDA®), bexarotene (TARGRETIN®), bleomycin (BLENOXANE®), busulfan (BUSULFEX®, MYLERAN®), calcium leucovorin (Citrovorum Factor, folinic acid, leucovorin), camptothecin-11 (CPT-11, irinotecan, CAMPTOSAR®), capecitabine (XELODA®), carboplatin (PARAPLATIN®), carmustine wafer (prolifeprospan 20 with carmustine implant, GLIADEL® wafer), CCI-779 (temsirolimus, TORISEL®), CCNU (lomustine, CeeNU), CDDP (cisplatin, PLATINOL®, PLATINOL-AQ®), chlorambucil (leukeran), cyclophosphamide (CYTOXAN®, NEOSAR®), dacarbazine (DIC, DTIC, imidazole carboxamide, DTIC-DOME®), daunomycin (daunorubicin, daunorubicin hydrochloride, rubidomycin hydrochloride, CERUBIDINE®), decitabine (DACOGEN®), dexrazoxane (ZINECARD®), DHAD (mitoxantrone, NOVANTRONE®), docetaxel (TAXOTERE®), doxorubicin (ADRIAMYCIN®, RUBEX®), epirubicin (ELLENCE™), estramustine (EMCYT®), etoposide (VP-16, etoposide phosphate, TOPOSAR®, VEPESID®, ETOPOPHOS®), floxuridine (FUDR®), fludarabine (FLUDARA®), fluorouracil (cream) (CARAC™, EFUDEX®, FLUOROPLEX®), gemcitabine (GEMZAR®), hydroxyurea (HYDREA®, DROXIA™, MYLOCEL™) idarubicin (IDAMYCIN®), ifosfamide (IFEX®), ixabepilone (IXEMPRA™), LCR (leurocristine, vincristine, VCR, ONCOVIN®, VINCASAR PFS®), L-PAM (L-sarcolysin, melphalan, phenylalanine mustard, ALKERAN®), mechlorethamine (mechlorethamine hydrochloride, mustine, nitrogen mustard, MUSTARGEN®), mesna (MESNEX™), mitomycin (mitomycin-C, MTC, MUTAMYCIN®), nelarabine (ARRANON®), oxaliplatin (ELOXATIN™), paclitaxel (TAXOL®, ONXAL™) pegaspargase (PEG-L-asparaginase, ONCOSPAR®), PEMETREXED (ALIMTA®), pentostatin (NIPENT®), procarbazine (MATULANE®), streptozocin (ZANOSAR®), temozolomide (TEMODAR®), teniposide (VM-26, VUMON®), TESPA (thiophosphoamide, thiotepa, TSPA, THIOPLEX®), topotecan (HYCAMTIN®), vinblastine (vinblastine sulfate, vincaleukoblastine, VLB, ALKABAN-AQ®, VELBAN®), vinorelbine (vinorelbine tartrate, NAVELBINE®), and vorinostat (ZOLINZA®).

[0888] In another embodiment, the multispecific or multifunctional molecule is administered in conjunction with a biologic. Biologics useful in the treatment of cancers are known in the art and a binding molecule of the invention may be administered, for example, in conjunction with such known biologics. For example, the FDA has approved the following biologics for the treatment of breast cancer: HERCEPTIN® (trastuzumab, Genentech Inc., South San Francisco, Calif; a humanized monoclonal antibody that has anti-tumor activity in HER2-positive breast cancer); FASLODEX® (fulvestrant, AstraZeneca Pharmaceuticals, LP, Wilmington, Del.; an estrogen-receptor antagonist used to treat breast cancer); ARIMIDEX® (anastrozole, AstraZeneca Pharmaceuticals, LP; a nonsteroidal aromatase inhibitor which blocks aromatase, an enzyme needed to make estrogen); Aromasin® (exemestane, Pfizer Inc., New York, N.Y.; an irreversible, steroidal aromatase inactivator used in the treatment of breast cancer); FEMARA® (letrozole, Novartis Pharmaceuticals, East Hanover, N.J.; a nonsteroidal aromatase inhibitor approved by the FDA to treat breast cancer); and NOLVADEX® (tamoxifen, AstraZeneca Pharmaceuticals, LP; a nonsteroidal antiestrogen approved by the FDA to treat breast cancer). Other biologics with which the binding molecules of the invention may be combined include: AVASTIN® (bevacizumab, Genentech Inc.; the first FDA-approved therapy designed to inhibit angiogenesis); and ZEVALIN® (ibritumomab tiuxetan, Biogen Idec, Cambridge, Mass.; a radiolabeled monoclonal antibody currently approved for the treatment of B-cell lymphomas).

[0889] In addition, the FDA has approved the following biologics for the treatment of colorectal cancer: AVASTIN®; ERBITUX® (cetuximab, ImClone Systems Inc., New York, N.Y., and Bristol-Myers Squibb, New York, N.Y.; is a monoclonal antibody directed against the epidermal growth factor receptor (EGFR)); GLEEVEC® (imatinib mesylate; a protein kinase inhibitor); and ERGAMISOL® (levamisole hydrochloride, Janssen Pharmaceutica Products, LP, Titusville, N.J.; an immunomodulator approved by the FDA in 1990 as an adjuvant treatment in combination with 5-fluorouracil after surgical resection in patients with Dukes' Stage C colon cancer).

[0890] For the treatment of lung cancer, exemplary biologics include TARCEVA® (erlotinib HCL, OSI Pharmaceuticals Inc., Melville, N.Y.; a small molecule designed to target the human epidermal growth factor receptor 1 (HER1) pathway).

[0891] For the treatment of multiple myeloma, exemplary biologics include VELCADE® Velcade (bortezomib, Millennium Pharmaceuticals, Cambridge Mass.; a proteasome inhibitor). Additional biologics include THALIDOMID® (thalidomide, Clegene Corporation, Warren, N.J.; an immunomodulatory agent and appears to have multiple actions, including the ability to inhibit the growth and survival of myeloma cells and anti-angiogenesis).

[0892] Additional exemplary cancer therapeutic antibodies include, but are not limited to, 3F8, abagovomab, adecatumumab, afutuzumab, alacizumab pegol, alemtuzumab (CAMPATH®, MABCAMPATH®), altumomab pentetate (HYBRI-CEAKER®), anatumomab mafenatox, anrukinzumab (IMA-638), apolizumab, arcitumomab (CEA-SCAN®), bavituximab, bectumomab (LYMPHOSCAN®), belimumab (BENLYSTA®, LYMPHOSTAT-B®), besilesomab (SCINTIMUN®), bevacizumab (AVASTIN®), bivatuzumab mertansine, blinatumomab, brentuximab vedotin, cantuzumab mertansine, capromab pendetide (PROSTASCINT®), catumaxomab (REMOVAB®), CC49, cetuximab (C225, ERBITUX®), citatuzumab bogatox, cixutumumab, clivatuzumab tetraxetan, conatumumab, dacetuzumab, denosumab (PROLIA®), detumomab, ecromeximab, edrecolomab (PANOREX®), elotuzumab, epitumomab cituxetan, epratuzumab, ertumaxomab (REXOMUN®), etaracizumab, farletuzumab, figitumumab, fresolimumab, galiximab, gemtuzumab ozogamicin (MYLOTARG®), girentuximab, glembatumumab vedotin, ibritumomab (ibritumomab tiuxetan, ZEVALIN®), igovomab (INDIMACIS-125®), intetumumab, inotuzumab ozogamicin, ipilimumab, iratumumab, labetuzumab (CEA-CIDE®), lexatumumab, lintuzumab, lucatumumab, lumiliximab, mapatumumab, matuzumab, milatuzumab, minretumomab, mitumomab, nacolomab tafenatox, naptumomab estafenatox, necitumumab, nimotuzumab (THERACIM®, THERALOC®), nofetumomab merpentan (VERLUMA®), ofatumumab (ARZERRA®), olaratumab, oportuzumab monatox, oregovomab (OVAREX®), panitumumab (VECTIBIX®), pemtumomab (THERAGYN®), pertuzumab (OMNITARG®), pintumomab, pritumumab, ramucirumab, ranibizumab (LUCENTIS®), rilotumumab, rituximab (MABTHERA®, RITUXAN®), robatumumab, satumomab pendetide, sibrotuzumab, siltuximab, sontuzumab, tacatuzumab tetraxetan (AFP-CIDE®), taplitumomab paptox, tenatumomab, TGN1412, ticilimumab (tremelimumab), tigatuzumab, TNX-650, tositumomab (BEXXAR®), trastuzumab (HERCEPTIN®), tremelimumab, tucotuzumab celmoleukin, veltuzumab, volociximab, votumumab (HUMASPECT®), zalutumumab (HUMAX-EGFR®), and zanolimumab (HUMAX-CD4®).

[0893] In other embodiments, the multispecific or multifunctional molecule is administered in combination with a viral cancer therapeutic agent. Exemplary viral cancer therapeutic agents include, but not limited to, vaccinia virus (vvDD-CDSR), carcinoembryonic antigen-expressing measles virus, recombinant vaccinia virus (TK-deletion plus GM-CSF), Seneca Valley virus-001, Newcastle virus, coxsackie virus A21, GL-ONC1, EBNA1 C-terminal/LMP2 chimeric protein-expressing recombinant modified vaccinia Ankara vaccine, carcinoembryonic antigen-expressing measles virus, G207 oncolytic virus, modified vaccinia virus Ankara vaccine expressing p53, OncoVEX GM-CSF modified herpes-simplex 1 virus, fowlpox virus vaccine vector, recombinant vaccinia prostate-specific antigen vaccine, human papillomavirus 16/18 L1 virus-like particle/AS04 vaccine, MVA-EBNA1/LMP2 Inj. vaccine, quadrivalent HPV vaccine, quadrivalent human papillomavirus (types 6, 11, 16, 18) recombinant vaccine (GARDASIL®), recombinant fowlpox-CEA(6D)/TRICOM vaccine; recombinant vaccinia-CEA(6D)-TRICOM vaccine, recombinant modified vaccinia Ankara-5T4 vaccine, recombinant fowlpox-TRICOM vaccine, oncolytic herpes virus NV1020, HPV L1 VLP vaccine V504, human papillomavirus bivalent (types 16 and 18) vaccine (CERVARIX®), herpes simplex virus HF10, Ad5CMV-p53 gene, recombinant vaccinia DF3/MUC1 vaccine, recombinant vaccinia-MUC-1 vaccine, recombinant vaccinia-TRICOM vaccine, ALVAC MART-1 vaccine, replication-defective herpes simplex virus type I (HSV-1) vector expressing human Preproenkephalin (NP2), wild-type reovirus, reovirus type 3 Dearing (REOLYSIN®), oncolytic virus HSV1716, recombinant modified vaccinia Ankara (MVA)-based vaccine encoding Epstein-Barr virus target antigens, recombinant fowlpox-prostate specific antigen vaccine, recombinant vaccinia prostate-specific antigen vaccine, recombinant vaccinia-B7.1 vaccine, rAd-p53 gene, Ad5-delta24RGD, HPV vaccine 580299, JX-594 (thymidine kinase-deleted vaccinia virus plus GM-CSF), HPV-16/18 L1/AS04, fowlpox virus vaccine vector, vaccinia-tyrosinase vaccine, MEDI-517 HPV-16/18 VLP AS04 vaccine, adenoviral vector containing the thymidine kinase of herpes simplex virus TK99UN, HspE7, FP253/Fludarabine, ALVAC(2) melanoma multi-antigen therapeutic vaccine, ALVAC-hB7.1, canarypox-hIL-12 melanoma vaccine, Ad-REIC/Dkk-3, rAd-IFN SCH 721015, TIL-Ad-INFg, Ad-ISF35, and coxsackievirus A21 (CVA21, CAVATAK®).

[0894] In other embodiments, the multispecific or multifunctional molecule is administered in combination with a nanopharmaceutical. Exemplary cancer nanopharmaceuticals include, but not limited to, ABRAXANE® (paclitaxel bound albumin nanoparticles), CRLX101 (CPT conjugated to a linear cyclodextrin-based polymer), CRLX288 (conjugating docetaxel to the biodegradable polymer poly (lactic-co-glycolic acid)), cytarabine liposomal (liposomal Ara-C, DEPOCYT™), daunorubicin liposomal (DAUNOXOME®), doxorubicin liposomal (DOXIL®, CAELYX®), encapsulated-daunorubicin citrate liposome (DAUNOXOME®), and PEG anti-VEGF aptamer (MACUGEN®).

[0895] In some embodiments, the multispecific or multifunctional molecule is administered in combination with paclitaxel or a paclitaxel formulation, e.g., TAXOL®, protein-bound paclitaxel (e.g., ABRAXANE®). Exemplary paclitaxel formulations include, but are not limited to, nanoparticle albumin-bound paclitaxel (ABRAXANE®, marketed by Abraxis Bioscience), docosahexaenoic acid bound-paclitaxel (DHA-paclitaxel, Taxoprexin, marketed by Protarga), polyglutamate bound-paclitaxel (PG-paclitaxel, paclitaxel poliglumex, CT-2103, XYOTAX, marketed by Cell Therapeutic), the tumor-activated prodrug (TAP), ANG105 (Angiopep-2 bound to three molecules of paclitaxel, marketed by ImmunoGen), paclitaxel-EC-1 (paclitaxel bound to the erbB2-recognizing peptide EC-1; see Li et al., Biopolymers (2007) 87:225-230), and glucose-conjugated paclitaxel (e.g., 2′-paclitaxel methyl 2-glucopyranosyl succinate, see Liu et al., Bioorganic & Medicinal Chemistry Letters (2007) 17:617-620).

[0896] Exemplary RNAi and antisense RNA agents for treating cancer include, but not limited to, CALAA-01, siG12D LODER (Local Drug EluteR), and ALN-VSP02.

[0897] Other cancer therapeutic agents include, but not limited to, cytokines (e.g., aldesleukin (IL-2, Interleukin-2, PROLEUKIN®), alpha Interferon (IFN-alpha, Interferon alfa, INTRON® A (Interferon alfa-2b), ROFERON-A® (Interferon alfa-2a)), Epoetin alfa (PROCRIT®), filgrastim (G-CSF, Granulocyte-Colony Stimulating Factor, NEUPOGEN®), GM-CSF (Granulocyte Macrophage Colony Stimulating Factor, sargramostim, LEUKINE™), IL-11 (Interleukin-11, oprelvekin, NEUMEGA®), Interferon alfa-2b (PEG conjugate) (PEG interferon, PEG-INTRON™), and pegfilgrastim (NEULASTA™)), hormone therapy agents (e.g., aminoglutethimide (CYTADREN®), anastrozole (ARIMIDEX®), bicalutamide (CASODEX®), exemestane (AROMASIN®), fluoxymesterone (HALOTESTIN®), flutamide (EULEXIN®), fulvestrant (FASLODEX®), goserelin (ZOLADEX®), letrozole (FEMARA®), leuprolide (ELIGARD™, LUPRON®, LUPRON DEPOT®, VIADUR™), megestrol (megestrol acetate, MEGACE®), nilutamide (ANANDRON®, NILANDRON®), octreotide (octreotide acetate, SANDOSTATIN®, SANDOSTATIN LAR®), raloxifene (EVISTA®), romiplostim (NPLATE®), tamoxifen (NOVALDEX®), and toremifene (FARESTON®)), phospholipase A2 inhibitors (e.g., anagrelide (AGRYLIN®)), biologic response modifiers (e.g., BCG (THERACYS®, TICE®), and Darbepoetin alfa (ARANESPo)), target therapy agents (e.g., bortezomib (VELCADE®), dasatinib (SPRYCEL™), denileukin diftitox (ONTAK®), erlotinib (TARCEVA®), everolimus (AFINITOR®), gefitinib (IRESSA®), imatinib mesylate (STI-571, GLEEVEC™), lapatinib (TYKERB®), sorafenib (NEXAVAR®), and SU11248 (sunitinib, SUTENT®)), immunomodulatory and antiangiogenic agents (e.g., CC-5013 (lenalidomide, REVLIMID®), and thalidomide (THALOMID®)), glucocorticosteroids (e.g., cortisone (hydrocortisone, hydrocortisone sodium phosphate, hydrocortisone sodium succinate, ALA-CORT®, HYDROCORT ACETATE®, hydrocortone phosphate LANACORT®, SOLU-CORTEF®), decadron (dexamethasone, dexamethasone acetate, dexamethasone sodium phosphate, DEXASONE®, DIODEX®, HEXADROL®, MAXIDEX®), methylprednisolone (6-methylprednisolone, methylprednisolone acetate, methylprednisolone sodium succinate, DURALONE®, MEDRALONE®, MEDROL®, M-PREDNISOL®, SOLU-MEDROL®), prednisolone (DELTA-CORTEF®, ORAPRED®, PEDIAPRED®, PRELONE®), and prednisone (DELTASONE®, LIQUID PRED®, METICORTEN®, ORASONE®)), and bisphosphonates (e.g., pamidronate (AREDIA®), and zoledronic acid (ZOMETA®))

[0898] In some embodiments, the multispecific or multifunctional molecule is used in combination with a tyrosine kinase inhibitor (e.g., a receptor tyrosine kinase (RTK) inhibitor). Exemplary tyrosine kinase inhibitor include, but are not limited to, an epidermal growth factor (EGF) pathway inhibitor (e.g., an epidermal growth factor receptor (EGFR) inhibitor), a vascular endothelial growth factor (VEGF) pathway inhibitor (e.g., an antibody against VEGF, a VEGF trap, a vascular endothelial growth factor receptor (VEGFR) inhibitor (e.g., a VEGFR-1 inhibitor, a VEGFR-2 inhibitor, a VEGFR-3 inhibitor)), a platelet derived growth factor (PDGF) pathway inhibitor (e.g., a platelet derived growth factor receptor (PDGFR) inhibitor (e.g., a PDGFR-β inhibitor)), a RAF-1 inhibitor, a KIT inhibitor and a RET inhibitor. In some embodiments, the anti-cancer agent used in combination with the AHCM agent is selected from the group consisting of: axitinib (AGO13736), bosutinib (SKI-606), cediranib (RECENTIN™, AZD2171), dasatinib (SPRYCEL®, BMS-354825), erlotinib (TARCEVA®), gefitinib (IRESSA®), imatinib (Gleeveco, CGP57148B, STI-571), lapatinib (TYKERB®, TYVERB®), lestaurtinib (CEP-701), neratinib (HKI-272), nilotinib (TASIGNA®), semaxanib (semaxinib, SU5416), sunitinib (SUTENT®, SU11248), toceranib (PALLADIA®), vandetanib (ZACTIMA®, ZD6474), vatalanib (PTK787, PTK/ZK), trastuzumab (HERCEPTIN®), bevacizumab (AVASTIN®), rituximab (RITUXAN®), cetuximab (ERBITUX®), panitumumab (VECTIBIX®), ranibizumab (Lucentis®), nilotinib (TASIGNA®), sorafenib (NEXAVAR®), alemtuzumab (CAMPATH®), gemtuzumab ozogamicin (MYLOTARG®), ENMD-2076, PCI-32765, AC220, dovitinib lactate (TK1258, CHIR-258), BIBW 2992 (TOVOK™), SGX523, PF-04217903, PF-02341066, PF-299804, BMS-777607, ABT-869, MP470, BIBF 1120 (VARGATEFR), AP24534, JNJ-26483327, MGCD265, DCC-2036, BMS-690154, CEP-11981, tivozanib (AV-951), OSI-930, MM-121, XL-184, XL-647, XL228, AEE788, AG-490, AST-6, BMS-599626, CUDC-101, PD153035, pelitinib (EKB-569), vandetanib (zactima), WZ3146, WZ4002, WZ8040, ABT-869 (linifanib), AEE788, AP24534 (ponatinib), AV-951(tivozanib), axitinib, BAY 73-4506 (regorafenib), brivanib alaninate (BMS-582664), brivanib (BMS-540215), cediranib (AZD2171), CHIR-258 (dovitinib), CP 673451, CYC116, E7080, Ki8751, masitinib (AB1010), MGCD-265, motesanib diphosphate (AMG-706), MP-470, OSI-930, Pazopanib Hydrochloride, PD173074, Sorafenib Tosylate (Bay 43-9006), SU 5402, TSU-68(SU6668), vatalanib, XL880 (GSK1363089, EXEL-2880). Selected tyrosine kinase inhibitors are chosen from sunitinib, erlotinib, gefitinib, or sorafenib. In one embodiment, the tyrosine kinase inhibitor is sunitinib.

[0899] In one embodiment, the multispecific or multifunctional molecule is administered in combination with one of more of: an anti-angiogenic agent, or a vascular targeting agent or a vascular disrupting agent. Exemplary anti-angiogenic agents include, but are not limited to, VEGF inhibitors (e.g., anti-VEGF antibodies (e.g., bevacizumab); VEGF receptor inhibitors (e.g., itraconazole); inhibitors of cell proliferatin and/or migration of endothelial cells (e.g., carboxyamidotriazole, TNP-470); inhibitors of angiogenesis stimulators (e.g., suramin), among others. A vascular-targeting agent (VTA) or vascular disrupting agent (VDA) is designed to damage the vasculature (blood vessels) of cancer tumors causing central necrosis (reviewed in, e.g., Thorpe, P. E. (2004) Clin. Cancer Res. Vol. 10:415-427). VTAs can be small-molecule. Exemplary small-molecule VTAs include, but are not limited to, microtubule destabilizing drugs (e.g., combretastatin A-4 disodium phosphate (CA4P), ZD6126, AVE8062, Oxi 4503); and vadimezan (ASA404).

### Immune Checkpoint Inhibitors

[0900] In other embodiments, methods described herein comprise use of an immune checkpoint inhibitor in combination with the multispecific or multifunctional molecule. The methods can be used in a therapeutic protocol in vivo.

[0901] In embodiments, an immune checkpoint inhibitor inhibits a checkpoint molecule. Exemplary checkpoint molecules include but are not limited to CTLA4, PD1, PD-L1, PD-L2, TIM3, LAG3, CD160, 2B4, CD80, CD86, B7-H3 (CD276), B7-H4 (VTCN1), HVEM (TNFRSF14 or CD270), BTLA, KIR, MHC class I, MHC class II, GAL9, VISTA, BTLA, TIGIT, LAIR1, and A2aR. See, e.g., Pardoll. Nat. Rev. Cancer 12.4(2012):252-64, incorporated herein by reference.

[0902] In embodiments, the immune checkpoint inhibitor is a PD-1 inhibitor, e.g., an anti-PD-1 antibody such as Nivolumab, Pembrolizumab or Pidilizumab. Nivolumab (also called MDX-1106, MDX-1106-04, ONO-4538, or BMS-936558) is a fully human IgG4 monoclonal antibody that specifically inhibits PD1. See, e.g., U.S. Pat. No. 8,008,449 and WO2006/121168. Pembrolizumab (also called Lambrolizumab, MK-3475, MK03475, SCH-900475 or KEYTRUDA®; Merck) is a humanized IgG4 monoclonal antibody that binds to PD-1. See, e.g., Hamid, O. et al. (2013) New England Journal of Medicine 369 (2): 134-44, U.S. Pat. No. 8,354,509 and WO2009/114335. Pidilizumab (also called CT-011 or Cure Tech) is a humanized IgG1k monoclonal antibody that binds to PD1. See, e.g., WO2009/101611. In one embodiment, the inhibitor of PD-1 is an antibody molecule having a sequence substantially identical or similar thereto, e.g., a sequence at least 85%, 90%, 95% identical or higher to the sequence of Nivolumab, Pembrolizumab or Pidilizumab. Additional anti-PD1 antibodies, e.g., AMP 514 (Amplimmune), are described, e.g., in U.S. Pat. No. 8,609,089, US 2010028330, and/or US 20120114649.

[0903] In some embodiments, the PD-1 inhibitor is an immunoadhesin, e.g., an immunoadhesin comprising an extracellular/PD-1 binding portion of a PD-1 ligand (e.g., PD-L1 or PD-L2) that is fused to a constant region (e.g., an Fc region of an immunoglobulin). In embodiments, the PD-1 inhibitor is AMP-224 (B7-DCIg, e.g., described in WO2011/066342and WO2010/027827), a PD-L2 Fc fusion soluble receptor that blocks the interaction between B7-H1 and PD-1.

[0904] In embodiments, the immune checkpoint inhibitor is a PD-L1 inhibitor, e.g., an antibody molecule. In some embodiments, the PD-L1 inhibitor is YW243.55.S70, MPDL3280A, MEDI-4736, MSB-0010718C, or MDX-1105. In some embodiments, the anti-PD-L1 antibody is MSB0010718C (also called A09-246-2; Merck Serono), which is a monoclonal antibody that binds to PD-L1. Exemplary humanized anti-PD-L1 antibodies are described, e.g., in WO2013/079174. In one embodiment, the PD-L1 inhibitor is an anti-PD-L1 antibody, e.g., YW243.55.S70. The YW243.55.S70 antibody is described, e.g., in WO 2010/077634. In one embodiment, the PD-L1 inhibitor is MDX-1105 (also called BMS-936559), which is described, e.g., in WO2007/005874. In one embodiment, the PD-L1 inhibitor is MDPL3280A (Genentech/Roche), which is a human Fc-optimized IgG1 monoclonal antibody against PD-L1. See, e.g., U.S. Pat. No. 7,943,743 and U.S Publication No.: 20120039906. In one embodiment, the inhibitor of PD-L1 is an antibody molecule having a sequence substantially identical or similar thereto, e.g., a sequence at least 85%, 90%, 95% identical or higher to the sequence of YW243.55.S70, MPDL3280A, MEDI-4736, MSB-0010718C, or MDX-1105.

[0905] In embodiments, the immune checkpoint inhibitor is a PD-L2 inhibitor, e.g., AMP-224 (which is a PD-L2 Fc fusion soluble receptor that blocks the interaction between PD1 and B7-H1. See, e.g., WO2010/027827 and WO2011/066342.

[0906] In one embodiment, the immune checkpoint inhibitor is a LAG-3 inhibitor, e.g., an anti LAG-3 antibody molecule. In embodiments, the anti-LAG-3 antibody is BMS-986016 (also called BMS986016; Bristol-Myers Squibb). BMS-986016 and other humanized anti-LAG-3 antibodies are described, e.g., in US 2011/0150892, WO2010/019570, and WO2014/008218.

[0907] In embodiments, the immune checkpoint inhibitor is a TIM-3 inhibitor, e.g., anti-TIM3 antibody molecule, e.g., described in U.S. Pat. No. 8,552,156, WO 2011/155607, EP 2581113 and U.S Publication No.: 2014/044728.

[0908] In embodiments, the immune checkpoint inhibitor is a CTLA-4 inhibitor, e.g., anti-CTLA-4 antibody molecule. Exemplary anti-CTLA4 antibodies include Tremelimumab (IgG2 monoclonal antibody from Pfizer, formerly known as ticilimumab, CP-675,206); and Ipilimumab (also called MDX-010, CAS No. 477202-00-9). Other exemplary anti-CTLA-4 antibodies are described, e.g., in U.S. Pat. No. 5,811,097.

### Diagnostic Uses

[0909] The antibody molecules described herein can be used, in some embodiments, in diagnostic methods, e.g., for determining if a subject has, or is at risk of having, a disease or disorder (e.g., cancer, e.g., a lymphoma, e.g., a T cell lymphoma, e.g., a T cell malignancy) as described herein. In some embodiments, the antibody molecule is used in a companion diagnostic, for example, to determine if a subject shows a change in prognosis, severity, or presence or absence of a disease or disorder (e.g., cancer), e.g., after treatment (e.g., with an antibody molecule described herein).

[0910] Generally, the diagnostic method comprises contacting an antibody molecule described herein with a biological sample (e.g., comprising a tissue or cell, or a portion or constituent thereof). In some embodiments, the method comprises flow analysis, e.g., using a multi-panel method. In some embodiments, the method comprises immunohistochemistry (e.g., chromogenic or fluorescent methods). In some embodiments, the method comprises immunohistochemistry (e.g., of fixed tissue, e.g., FFPE tissue). In some embodiments, the method comprises assessing T-cell clonality, e.g., to determine the presence and/or level of T cell malignancy. In some embodiments, the method comprises measuring the level of TRBC1+ cells from the biological sample (e.g., determining if TRBC1+ cells are depleted, e.g., relative to a reference sample, e.g., from a healthy subject or a subject who has not been treated an antibody molecule described herein). In some embodiments, the method comprises measuring the level of TRBC2+ cells from the biological sample (e.g., determining if TRBC2+ cells are depleted, e.g., relative to a reference sample, e.g., from a subject or a subject who has not been treated an antibody molecule described herein). In some embodiments, the method comprises measuring intracellular levels (e.g., intracellular expression) of TRBC1. In some embodiments, the method comprises measuring membrane levels (e.g., membrane expression) of TRBC1. In some embodiments, the method comprises measuring intracellular levels (e.g., intracellular expression) of TRBC2. In some embodiments, the method comprises measuring membrane levels (e.g., membrane expression) of TRBC2.

[0911] In one aspect, the present disclosure provides a diagnostic method for detecting the presence of a TRBC1 or TRBC2 protein in vitro (e.g., in a biological sample, such as a tissue biopsy (e.g., from a cancerous tissue) or a blood sample, e.g., from a subject) or in vivo (e.g., in vivo imaging in a subject). The method includes: (i) contacting the sample with an antibody molecule described herein, or administering to the subject an antibody molecule described herein; (optionally) (ii) contacting a reference sample (e.g., a control sample), e.g., from a healthy subject or a subject who has not been treated with an antibody molecule described herein, or a reference subject (e.g., a control subject), e.g., a healthy subject or a subject who has not been treated with an antibody molecule described herein); and (iii) detecting formation of a complex between the antibody molecule and the sample or subject, and (optionally) the reference sample or subject. In some embodiments, a change, e.g., a statistically significant change, in the formation of the complex in the sample or subject, relative to the reference sample or subject is indicative of the presence of TRBC1 or TRBC2 in the sample or subject.

[0912] In some embodiments, the biological sample comprises one or more of plasma, tissue (e.g., cancerous tissue), biopsy, blood (e.g., whole blood), PBMCs, bone marrow, and/or lymphatic tissue, e.g., lymph node. In some embodiments, the biological sample is freshly obtained from the subject (e.g., has not been frozen and/or fixed). In some embodiments, the biological sample has been frozen (e.g., snap frozen). In some embodiments, the biological sample has been fixed (e.g., a formalin-fixed paraffin-embedded (FFPE) sample).

[0913] The antibody molecule can be directly or indirectly labeled with a detectable substance to facilitate detection of the bound or unbound antibody. Suitable detectable substances include, for example, various enzymes, prosthetic groups, fluorescent materials, luminescent materials and radioactive materials, e.g., as described above and described in more detail below.

[0914] The term “sample,” as it refers to samples used for detecting polypeptides includes, but is not limited to, cells, cell lysates, proteins or membrane extracts of cells, body fluids, or tissue samples.

[0915] Complex formation between the antibody molecule and either TRBC1 or TRBC2 can be detected by measuring or visualizing either the binding molecule bound to the TRBC1 or TRBC2 antigen or unbound binding molecule. Conventional detection assays can be used, e.g., tissue immunohistochemistry, flow analysis, immune-cyto-chemical analysis, fluorescence microscopy, an enzyme-linked immunosorbent assay (ELISA), and/or a radioimmunoassay (RIA). Alternative to labeling the antibody molecule, the presence of TRBC1 or TRBC2 can be assayed in a sample by a competition immunoassay utilizing standards labeled with a detectable substance and an unlabeled antibody molecule. In this assay, the biological sample, the labeled standards and the antibody molecule are combined, and the amount of labeled standard bound to the unlabeled binding molecule is determined. The amount of TRBC1 or TRBC2 in the sample is inversely proportional to the amount of labeled standard bound to the antibody molecule.

### EXAMPLES

### Example 1: Immunization of Armenian Hamster to Generate Anti-NKp30 Antibodies

[0916] Briefly, armenian hamster were immunized with the extracellular domain of human NKp30 protein in complete Freund's adjuvant and boosted twice on day 14 and day 28 with NKp30 in incomplete Freund's adjuvant (IFA). On day 56 one more boost in IFA was given and the animals harvested three days later. Spleens were collected and fused with P3X63Ag8.653 murine myeloma cell line. 0.9×10\hat{ }5 cells/well in 125 ul were seated in 96 well plate and feed with 125 μl of I-20+2ME+HAT (IMDM (4 g/L glucose) supplemented with 20% fetal bovine serum, 4 mM L-glutamine, 1 mM sodium pyruvate, 50 U penicillin, 50 μg streptomycin and 50 μM 2-ME in the absence or presence of HAT or HT for selection, and Hybridoma Cloning Factor (1% final) on days 7, 11 and thereafter as needed. At approximately 2 weeks after fusion (cells are about 50% confluent) supernatant was collected and assayed for binding.

### Example 2: Hybridoma Screen for NKp30 mAbs

[0917] Expi293 cells were transfected with BG160 (hNKp30 cell antigen) 18 hours prior to screening. The day of screening, transfected cells were diluted to 0.05×10\hat{ }⁶/mL and anti-Armenian hamster Fc Alexa Fluor 488 added to a final concentration of 0.4 ug/mL. 50 uL (2,500 cells) of this mixture was added to each well of a 384 well plate. The same density of untransfected 293 cells with secondary were used as a negative control. 5 uL of hybridoma supernatant was added to the cell mixture and the plate incubated for 1 hour at 37° C. The plates were then imaged on Mirrorball. Positive clones were identified and subcloned by serial dilution to obtain clonal selected hybridoma. After reconfirmation using the same protocols the hybridoma cells were harvested and the corresponding heavy and light chain sequences recovered. The DNA was subcloned into pcDNA3.4 for subsequent expression of the corresponding antibodies and further validation.

### Example 3: Binding of NKp30 Antibodies to NK92 Cells

[0918] NK-92 cells were washed with PBS containing 0.5% BSA and 0.1% sodium azide (staining buffer) and added to 96-well V-bottom plates with 200,000 cells/well. Hamster NKp30 antibodies were added to the cells in 2.0-fold serial dilutions and incubated for 1 hour at room temperature. The plates were washed twice with staining buffer. The secondary antibody against hamster Fc conjugated to AF647 (Jackson, 127-605-160) was added at 1:100 dilution (1.4 mg/ml stock) and incubated with the cells for 30 minutes at 4° C. followed by washing with staining buffer. Cells were subsequently fixed for 10 minutes with 4% paraformaldehyde at room temperature. The plates were read on CytoFLEX LS (Beckman Coulter). Data was calculated as the percent-AF747 positive population (FIG. 9).

### Example 4: Bioassay to Measure Activity of NKp30 Antibodies Using NK92 Cell Line

[0919] NKp30 antibodies were three-fold serially diluted in PBS and incubated at 2-8 C° overnight in flat bottom 96 well plates. Plates were washed twice in PBS and 40,000 NK-92 cells were added in growth medium containing IL-2. Plates were incubated at 37 C.°, 5% CO2, humidified incubator for 16-24 hours before supernatants were collected. IFNγ levels in supernatants was measured following MSD assay instructions (FIG. 10). Supernatant collected from cells incubated with hamster isotype IgG was used as negative control and supernatants from cells incubated with NKp30 monoclonal antibody (R&D, clone 210847) was utilized as a positive control. Data were generated using hamster anti-NKp30 mABs.

### Example 5: ELISA to Measure Binding of Humanized JOVI.1 Variant to Human TRBC1

[0920] An ELISA assay was performed to assay binding of a humanized JOVI.1 variant to human TRBC1. Microplates were coated with 1 ug/mL of each JOVI.1 variant separately in 100 uL and blocked with 2% BSA. Serial dilutions of hTRBC1, BIM0444 (7 points, 5-fold dilutions, 100 nM to 6.4 μM) were transferred to the coated and blocked plates at 100 uL/well and incubated for 1 hr at room temperature. Plates were washed three times and incubated for 30 mins with anti-his tag Fc horseradish peroxidase conjugate followed by addition of TMB, a substrate of HRP. The plates were developed for 5 mins, stopped with 1M HCL and read at a wavelength of 450 nm. The ELISA data show direct binding of anti-TRBC1 mAbs (bivalent) to human TRBC1 (FIG. 7).

### Example 6: Assay to Measure Binding of Humanized JOVI.1 Variant to Human TRBC1

[0921] An Octet assay was performed to check binding of JOVI.1 humanized variants. Protein A biosensors were equilibrated in PBS at 25° C. The sensors were loaded with hTRBC1, BIM0444 at 20 ug/mL in PBS to a response of 1.5 nM followed by serial dilutions of JOVI1.1 fabs, BIM0446 and BIM0460 (7 points, 2-fold dilutions, 50 nM to 0.78 nM).

[0922] Further Octet parameters include:
[0923] Baseline: 30 sec in PBS
[0924] Load: 20 sec to a response of 1.5 nm
[0925] Baseline: 60 sec
[0926] Association: 60 sec
[0927] Dissociation: 60 sec in PBS

[0928] Octet data showed binding of anti-TRBC1 Fabs to hTRBC1 (FIG. 8). hTRBC1 was captured on the sensor tip and dipped in solution containing different concentrations of monovalent Fabs.

### Example 7: Generation and Characterization of Humanized Anti-NKp30 Antibodies

[0929] A series of hamster anti-NKp30 antibodies were selected. These antibodies were shown to bind to human NKp30 and cynomolgus NKp30 and induce IFNγ production from NK-90 cells (data not shown). The VH and VL sequences of exemplary hamster anti-NKp30 antibodies 15E1, 9G1, 15H6, 9D9, 3A12, and 12D10 are disclosed in Table 9. The VH and VL sequences of exemplary humanized anti-NKp30 antibodies based on 15E1, 9G1, and 15H6 are also disclosed in Table 9. The Kabat CDRs of these antibodies are disclosed in Table 18 and Table 8.

[0930] Two humanized constructs based on 15E1 were selected. The first construct BJM0407 is a Fab comprising a heavy chain variable region comprising the amino acid sequence of SEQ ID NO: 7302 and a lambda light chain variable region comprising the amino acid sequence of SEQ ID NO: 7305. Its corresponding scFv construct BJM0859 comprises the amino acid sequence of SEQ ID NO: 7310. The second construct BJM0411 is a Fab comprising a heavy chain variable region comprising the amino acid sequence of SEQ ID NO: 7302 and a kappa light chain variable region comprising the amino acid sequence of SEQ ID NO: 7309. Its corresponding scFv construct BJM0860 comprises the amino acid sequence of SEQ ID NO: 7311. BJM0407 and BJM0411 showed comparable biophysical characteristics, e.g., binding affinity to NKp30 and thermal stability. The scFv constructs BJM0859 and BJM0860 also showed comparable biophysical properties.

### Example 8: Generation and Characterization of Humanized Anti-TRBC1 Antibodies

[0931] The murine anti-TRBC1 antibody JOVI.1 was humanized, leading to a number of humanized variants. The VH and VL sequences of exemplary humanized variants are disclosed in Table 4. One humanized variant BIM0460 was selected, which comprises a VH comprising the amino acid sequence of SEQ ID NO: 253 and a VL comprising the amino acid sequence of SEQ ID NO: 258. BIM0460 was further modified by germlining, leading to a number of germlined variants. The VH and VL sequences of exemplary germlined variants are also disclosed in Table 4. One germlined variant BJM0578 was selected, which comprises a VH comprising the amino acid sequence of SEQ ID NO: 7351 and a VL comprising the amino acid sequence of SEQ ID NO: 258. The Kabat CDRs of these humanized and germlined variants are disclosed in Table 6 and Table 3. BIM0460 was shown to bind to human TRBC1 with an affinity of 17 nM. BJM0578 was shown to bind to human TRBC1 with an affinity of 110 nM.

### Example 9: Cytokine Secretion and T Cell Activation Profiling

[0932] This example explores whether ADCC-disabled formats would be preferable for antibodies that bind to TRBC1 and NKp30. JOVI.1 engagement upon plate coating or in solution upon Fc engagement induced T cell proliferation and activation (data not shown). This could be a liability for treating patients with T cell lymphoma, e.g., patients with peripheral T-cell lymphoma (PTCL).

[0933] Five constructs were generated as shown in FIGS. 11A-11E. BJM1052 is a bispecific antibody comprising an anti-TRBC1 Fab (based on BIM0460) and an anti-NKp30 scFv (based on BJM0407) (FIG. 11A). BJM1052 comprises the amino acid sequences of SEQ ID NO: 7379 (anti-TRBC1 HC), SEQ ID NO: 7380 (anti-TRBC1 LC), and SEQ ID NO: 7383 (anti-NKp30 scFv-Fc). BIM1052 comprises an N297A mutation in its Fc region. BIM1042 is a bispecific antibody comprising an anti-TRBC1 Fab (based on BJM0578) and an anti-NKp30 scFv (based on BJM0407) (FIG. 11B). BJM1042 comprises the amino acid sequences of SEQ ID NO: 7382 (anti-TRBC1 HC), SEQ ID NO: 7380 (anti-TRBC1 LC), and SEQ ID NO: 7383 (anti-NKp30 scFv-Fc). BJM1042 comprises an N297A mutation in its Fc region. BJM0889 is a single arm antibody comprising an anti-TRBC1 Fab (based on BIM0460) (FIG. 11C). BJM1083 is a single arm antibody comprising an anti-TRBC1 Fab (based on BJM0578) (FIG. 11D). Both BJM0889 and BJM1083 comprise an N297A mutation in the Fc region. BJM1053 is similar to BJM1052, except that BJM1053 has an ADCC enabled Fc region.

[0934] As shown in FIGS. 12A and 12B, Fc enabled antibodies BJM1053 and hIgG1 bound to THP1 cells which express Fcγ receptors, whereas N297A mutated antibodies (BJM1052, BJM1042, and BJM0889) did not show significant binding.

[0935] To test if antibodies with N297A mutation (Fc disabled) are safer, anti-TRBC1/NKp30 antibodies and control molecules were added to PBMCs in solution at 100, 10 or 1 nM and T cell proliferation was measured on Days 1 and Day 5. Fc disabled antibodies BJM1052 and BJM1042 showed less lymphocyte clustering than the Fc enabled antibody BJM1053 (data not shown). T cell activation was significantly reduced in PBMCs treated with BJM1052 and BJM1042 on Day 5, as demonstrated by the percentage of proliferating T cells (FIGS. 13A and 13B) as well as the percentage of CD69−CD25+ T cells (FIGS. 13C and 13D).

### Example 10: In Vitro Binding to TRBC1 and NKp30

[0936] Various constructs were generated as shown in FIGS. 14A-14D. Shown in FIG. 14A is a bispecific antibody comprising an anti-TRBC1 Fab (based on BIM0460 or BJM0578) and an anti-NKp30 scFv (based on BJM0407 or BJM0411). The bispecific antibodies may or may not have an N297A mutation in their Fc regions. The molecules listed in FIG. 14B have the configuration shown in FIG. 14A.

[0937] FIG. 14C shows a bispecific antibody comprising an anti-TRBC1 Fab (based on BIM0460 or BJM0578) and an anti-NKp30 Fab (based on BJM0407 or BJM0411). The bispecific antibodies may or may not have an N297A mutation in their Fc regions. The molecules listed in FIG. 14D have the configuration shown in FIG. 14C.

[0938] All the anti-TRBC1/NKp30 antibodies tested exhibited binding to NK cell line KHYG-1 (FIGS. 15A and 15D) as well as TRBC1+ Jurkat cells (FIGS. 15B and 15D).

### Example 11: In Vitro Cytolysis of TRBC1+ Cell Lines

[0939] In this example, anti-TRBC1/NKp30 antibodies were tested for their ability to induce killing of TRBC1-expressing cells in the presence of NK cells. The antibodies tested in this Example are shown in FIGS. 11A-11E.

[0940] In a first study, NK-92 effector cells were cultured in 5:1 ratio with CFSE labeled target cells for 4 h. Target cell lysis was measured using flow cytometry and gating on dead target cells. Anti-TRBC1/NKp30 bispecific antibodies BJM1052 and BJM1042 induced killing of TRBC1+ Jurkat cells (FIG. 16A) and H9 cells (FIG. 16B), but not TRBC2+ HPB-ALL cells (FIG. 16C), in the presence of NK-92 effector cells.

[0941] In a second study, primary NK cells were cultured in 5:1 ratio with CFSE labeled target cells for 4 h. For H9 cells, 10:1 E:T ratio was used. Target cell lysis was measured using flow cytometry. Anti-TRBC1/NKp30 bispecific antibodies BJM1052 and BJM1042 induced killing of TRBC1+ Jurkat cells (FIG. 17A) and H9 cells (FIG. 17B), but not TRBC2+ HPB-ALL cells (FIG. 17C), in the presence of primary NK cells.

[0942] In a third study, NK cells and target cells were co-cultured for 4 hours in the presence of anti-TRBC1/NKp30 antibodies BJM1052 and BJM1042, supernatants were collected, and cytokine levels were measured using MSD. Target cell lysis correlated with NK cell activation, as demonstrated by the percentage of CD69+CD107a+ NK cells (FIG. 18A), IFNγ secretion (FIG. 18B), and TNFα secretion (FIG. 18C).

[0943] The next study examines whether anti-TRBC1/NKp30 antibodies BJM1052 and BJM1042 activates NK cells in the absence of target cells. Primary NK cells were incubated with 50 nM of antibodies for 4 h in the absence of target cells, and then supernatants were collected to measure IFNγ and TNFα levels. As shown in FIGS. 19A and 19B, NK cell activation mediated by anti-TRBC1/NKp30 antibodies required the presence of both NK cells and target cells.

[0944] Finally, anti-TRBC1/NKp30 antibodies BJM1052 and BJM1042 did not induce NK cell death in the presence of target cells (FIG. 20).

### Example 12: Selective In Vitro Cytolysis of Patient-Derived TRBC1+ or TRBC2+ PDX

[0945] Common subtypes of T-cell lymphoma include: Peripheral T-Cell Lymphoma, Not Otherwise Specified (PTCL-NOS); Anaplastic Large Cell Lymphoma (ALCL); Angioimmunoblastic T-Cell Lymphoma (AITL); and Cutaneous T-Cell Lymphoma (CTCL). Uncommon subtypes of T-cell lymphoma include: Adult T-Cell Leukemia/Lymphoma (ATLL); T-Cell Lymphoblastic Lymphoma; Hepatosplenic Gamma-Delta T-Cell Lymphoma; Enteropathy-Type T-Cell Lymphoma; Nasal NK/T-Cell Lymphomas; Treatment-Related T-Cell Lymphomas. Similar frequency and expression of TRBC1 was observed in PBMCs isolated from healthy donors and PBMCs isolated from PTCL patients (data not shown).

[0946] Two Patient-Derived Xenograft (PDX) samples were tested to be TRBC1 positive: PDX3 was derived from a patient with Acute Lymphoblastic Leukemia (T-ALL), and PDX6 was derived from a patient with Primary cutaneous CD30+ T-Cell Lymphoproliferative Disorder (CTCL).

[0947] The antibodies shown in FIGS. 21A and 21B were used in a functional killing assay. BJM0145 is a single arm anti-TRBC1 antibody. BJM0773 is a bispecific antibody comprising an anti-TRBC1 Fab and an anti-NKp30 scFv. PDX samples were labeled with CFSE, cultured with primary NK cells or KHYG1 cells at 5:1 ratio of E:T for 5 hours in the presence of BJM0145 or BJM0773 (0.01-10 nM). Specific killing was measured using the following calculation:

% dead treated(PDX+NK)−% dead PDX

100% (Max killing)−% dead PDX

[0948] As shown in FIGS. 22A-22D, anti-TRBC1/NKp30 antibody BJM0773 efficiently killed TRBC1 positive PDX3 and PDX6. The single arm anti-TRBC1 antibody BJM0145 exhibited weak killing in the presence of primary NK cells due to ADCC (FIGS. 22A and 22C), but not in the presence of KHYG1 cells, which are CD16 deficient NK cells (FIGS. 22B and 22D). The single arm anti-TRBC1 antibody or the bispecific anti-TRBC1/NKp30 antibody did not kill TRBC1 negative PDX (data not shown).

### Example 13: In Vitro Cytolysis of TRBC1+ Jurkat Cells Using NK Cells from PTCL Patients

[0949] This example examines whether anti-TRBC1/NKp30 antibodies can mediate killing of TRBC1+ target cells in the presence of NK cells isolated from PTCL patients.

[0950] NK cells and NKp30+ NK cells are present in normal proportions in PTCL patient PBMCs (data not shown). NK cells were enriched from PTCL patients and healthy donor PBMCs by negative selection and then incubated overnight with 200 U/ml IL-2. On the following day, NK cells were co-cultured with Jurkat cells for 4 h in the presence of 10 nM antibodies.

[0951] As shown in FIG. 23, PTCL patient derived NK cells killed TRBC1+ Jurkat cells in the presence of the anti-TRBC1/NKp30 antibody BJM1042. NK cells were activated during the killing assay, as demonstrated by the percentage of CD69+CD107+ NK cells (FIG. 24). The bispecific anti-TRBC1/NKp30 antibodies BJM1052 and BJM1042 induced higher levels of IFNγ (FIG. 25A) and TNFα (FIG. 25B) than the single arm anti-TRBC1 antibody FJM0889 did.

### Example 14: Competition with B7-H6, a Natural Ligand for NKp30

[0952] The natural ligands of NKp30 includes B7-H6, pp65, BAT3, and BAG6. B7-H6 is found on many cancer cell lines and primary cancer cells (e.g., T- and B-cell lymphoma, leukemia, and melanoma). Membrane-bound B7-H6 can mediate activation of primary human NK cells and killing of target cells. Soluble B7-H6, on the other hand, is found in serum or tumor microenvironment and can inhibit binding of anti-NKp30 mAbs, down-modulate NKp30 expression, and dampen NKp30-mediate activation and target cell killing.

[0953] This example examines whether the bispecific anti-TRBC1/NKp30 antibodies compete with B7-H6 for binding to NKp30.

[0954] As shown in FIGS. 26A and 26B, the bispecific anti-TRBC1/NKp30 antibody BJM1042 bound more strongly to NKp30 than B7-H6. In a competition assay, B7H6 (4 μg/ml, ˜143 nM) and varying concentration of antibodies (BJM1042, anti-NKp30 or anti-NKp46) were added simultaneously to NKp30 coated ELISA plate. As shown in FIG. 26C, B7H6 binding signal was diminished with increasing concentrations of competing antibodies. BJM1042 competed with B7-H6 for binding with NKp30, to a similar level as a positive control anti-NKp30 antibody (FIG. 26C). A negative control anti-NKp46 antibody did not interfere with B7-H6 binding to NKp30, suggesting that the interference observed in this ELISA was specific (FIG. 26C).

### Example 15: In-Vivo Killing of TRBC1 Cell Line Derived Model

[0955] This example examines the anti-tumor activity of the anti-TRBC1/NKp30 antibody BJM1042 in an in vivo model.

[0956] On day 0, NOG-IL-15 mice were implanted subcutaneously with H9 tumor cells. 16 days post tumor implant, mice were engrafted with in vitro expanded primary NK cells. Two weeks following NK implant (31 days post tumor implant), mice were randomized by tumor volume and dosed with 1 mg/kg BJM1042 or associated controls. Tumor volume and body weight was measured daily following exposure to test articles.

[0957] The anti-TRBC1/NKp30 antibody BJM1042 induced regression of subcutaneous H9 tumors in NOG IL-15 mice engrafted with primary NK cells (FIGS. 27B and 27C). BJM1042 also inhibited tumor growth in the absence of NK cells, but to a lesser extent compared to treatment in the presence of NK cells (FIGS. 27B and 27C). Similar results were observed with the anti-TRBC1 control antibody BJM1083 (FIGS. 27B and 27C).

### Example 16: In-Vivo Specificity for TRBC1

[0958] In this example, the specificity of BJM1042 was evaluated using TRBC2-expressing HPB-ALL xenografts in primary NK cell engrafted NOG-IL-15 mice.

[0959] On day 0, NOG-IL-15 mice were implanted subcutaneously with 5e6 TRBC2+ HPB-ALL cells. 12 days post tumor implant, mice were engrafted with 2e6 in vitro expanded primary NK cells. 2 days following NK implant (14 days post tumor implant), mice were randomized by tumor volume and dosed with 0.5 mg/kg BJM1042 or associated controls. Mice were treated with therapeutics twice a week. Tumor volume was quantified by calipers twice a week. Body weight was measured twice a week.

[0960] The anti-TRBC1/NKp30 antibody BJM1042, which induced regression of TRBC1-expressing H9 and Jurkat tumors, did not affect the growth of TRBC2-expressing HPB-ALL tumors (FIG. 28B). The molecules were well tolerated at the doses used and did not result in body weight loss or any other obvious adverse effects (data not shown).

### Example 17: Biophysical Analysis of Anti-TRBC1/NKp30 Antibodies

[0961] The anti-TRBC1/NKp 30 antibodies BJM1042 and BJM1052 were analyzed for biophysical properties. BJM1042 and BJM1052 exhibited high stability and low aggregation propensity. BJM1042 and BJM1052 showed retained binding to FcRn and reduced or negligible binding to Fcγ receptors.

### Example 18: Biacore Analysis of Exemplary Anti-TRBC1 Antibody Molecules

[0962] In this example, a series of exemplary anti-TRBC1 antibody molecules were analyzed for their binding affinity for TRBC1. Briefly, surface plasmon resonance (SPR) measurements were performed by using the BIAcore T200. Each of the exemplary anti-TRBC1 antibody constructs was immobilized on a CM5 chip via anti-human Fc antibody to a response of 50 RU. Human TRBC1 (BIM0443) was injected at concentrations of 15.6, 31.2, 62.5, 125, 250, and 500 nM, at a flow rate of 20 μl/min, over the surface on which each antibody construct was immobilized. The data was fit using a 1:1 binding model.

[0963] As shown in Table 26, the exemplary antibodies showed preserved affinity to human TRCB1 compared to the parental antibody.

TABLE 26
Biacore results

| | | BIM0443 | | BIM0445 |
|---|---|---|---|---|
| Construct | Description | (hTRBC1) | | (hTRBC2) |
| BIM0460 (bivalent) | Parental | 10 | nM | No binding |
| BJM0578 (bivalent) | Parental | 75 | nM | No binding |
| BKM0191 (single arm) | G29A | 75 | nM | No binding |
| BKM0192 (single arm) | T31A | 138 | nM | No binding |
| BKM0193 (single arm) | G29A_T31A | 360 | nM | No binding |
| BKM0194 (single arm) | N28G | 180 | nM | No binding |
| BKM0195 (single arm) | N30S | 317 | nM | No binding |
| BKM0196 (single arm) | N28G_N30S | 690 | nM | No binding |

### Example 19: Biacore Analysis of Exemplary Anti-NKp30 Antibody Molecules

[0964] In this example, a series of exemplary anti-NKp30 antibody molecules were analyzed for their binding affinity for NKp30. Briefly, surface plasmon resonance (SPR) measurements were performed by using the BIAcore T200. Human NKp30 (BKM0179) was immobilized on a CM5 chip via anti-mouse Fc antibody to a response of 50 RU. Each exemplary antibody construct were injected at concentrations of 3.9, 7.8, 15.6, 31.2, 62.5, and 125 nM, and at a flow rate of 20 μl/min, over the surface on which the human NKp30 was immobilized. The data was fit using a 1:1 binding model.

[0965] As shown in Table 27, most of the exemplary antibodies showed preserved affinity to human NKp30 compared to the parental antibody.

TABLE 27
Biacore results

| | | Human Nkp30 | |
|---|---|---|---|
| Construct | Description | (BKM0179) | |
| BJM1078 | BJM0407 Parental | 1.48 | nM |
| BJM1079 | BJM0411 Parental | 1.26 | nM |
| BKM0138 | BJM0411 VL-N95A | 3.2 | nM |
| BKM0139 | BJM0411 VL-D92A | 3.2 | nM |
| BKM0140 | BJM0407 VL-D92A | 3.3 | nM |
| BKM0141 | BJM0407 VL-N95A | 3.0 | nM |
| BKM0142 | BJM0411 VH-N60A | 1.28 | nM |
| BKM0143 | BJM0407 VH-N60A | 1.45 | nM |
| BKM0144 | BJM0411 VH-N60A-VL-D92A-N95A | 6.4 | nM |
| BKM0145 | BJM0407 VH-N60A-VL-D92A-N95A | 4.2 | nM |

### Example 20. Generation of Exemplary Anti-TRBC2 Antibodies

[0966] Anti-TRBC1 antibodies were engineered to introduce specificity to TRBC2 using display-based approaches. Through multiple cycles of molecular evolution, anti-TRBC1 antibody was mutated to achieve TRBC2 binding and lose TRBC1 binding. For this purpose, scFv libraries were built using random mutagenesis (1) or a modified version of Kunkel mutagenesis (2). Library selections vs human TRBC2 were performed using standard phage display (3) and yeast display techniques (4). During selections, varying concentrations of competitor unlabeled TRBC1 were added to enrich for mutants that do not bind TRBC1. Selections were followed by standard screening methods such as ELISA and flow cytometry to identify individual clones that bind TRBC2 specifically. Following hit sequencing and analysis of mutation-activity correlation, second-generation libraries were constructed using the same methods above in order to improve specific TRBC2 binding, remove a potential CDR-deamidation site, and humanize the CDRs based on the closest-germline alignment. Library selections and individual clone screening were repeated as above with the modification that more stringent conditions were applied to select for clones with enhanced, but specific TRBC2 affinity. Following hit sequencing, scFv genes were reformatted into the biologically relevant antibody format for expression, purification, and triaging.

### Example 21. TRBC1 and TRBC2 Antibodies Utilized in the Flow Based Assay for the Diagnosis of TRBC1 vs TRBC2 Monotypia in T− Cell Malignancies

[0967] Healthy human donor PBMCs derived T cell populations contain both TRBC1+ and TRBC2+ compartments, whereas T cell malignancies are predominantly monotypic. Flow method has been applied to test for monotypia and specificity for TRBC1 vs TRBC2 in one healthy donor PBMC and four PBMC samples from pre-diagnosed to be T malignancies. Heparinized whole blood from patients was lysed with ACK lysis buffer followed by 20 min Fc Block. Blood from patients was stained with Jovi.1 (TRBC1 antibody) or BKM0213 (TRBC2 antibody). Cells were washed in PBS followed by staining with antibody cocktail containing CD56-PE (NK Marker), CD3-AF700 (T-Cell Marker), CD4-BV421 (T-Cell Marker), CD8-Percp cy5.5 (T-Cell Marker) and Live/Dead staining. The cells were then fixed, and flow assessments were acquired on CytoFLEX LX.

### INCORPORATION BY REFERENCE

[0968] All publications and patents mentioned herein are hereby incorporated by reference in their entirety as if each individual publication or patent was specifically and individually indicated to be incorporated by reference.

### EQUIVALENTS

[0969] Those skilled in the art will recognize, or be able to ascertain using no more than routine experimentation, many equivalents to the specific embodiments of the invention described herein. Such equivalents are intended to be encompassed by the following claims.

### EXEMPLARY EMBODIMENTS

[0970] Additional features of any of the aforesaid multifunctional molecules, nucleic acids, vectors, host cells, or methods include one or more of the following exemplary embodiments.

[0971] Those skilled in the art will recognize, or be able to ascertain using no more than routine experimentation, many equivalents to the specific embodiments of the invention described herein. Such equivalents are intended to be encompassed by the following exemplary embodiments.

### Exemplary Embodiment 1

[0972] The disclosure relates, inter alia, to novel multispecific or multifunctional molecules that include (i) an antigen binding domain that binds to a tumor antigen on a lymphoma cell (e.g., a T cell), e.g., a T cell receptor comprising T cell receptor beta chain constant domain 1 (TRBC1) or a T cell receptor comprising T cell receptor beta chain constant domain 2 (TRBC2); and one, two or all of: (ii) an immune cell engager (e.g., chosen from an NK cell engager, a T cell engager, a B cell engager, a dendritic cell engager, or a macrophage cell engager); (iii) a cytokine molecule; and/or (iv) a stromal modifying moiety. The terms “multispecific” or “multifunctional” are used interchangeably herein.

[0973] Without wishing to be bound by theory, the multispecific or multifunctional molecules disclosed herein are expected to target (e.g., localize, bridge and/or activate) an immune cell (e.g., an immune effector cell chosen from an NK cell, a T cell, a B cell, a dendritic cell or a macrophage), at a target cell, e.g., a cancer cell (e.g., a lymphoma cell), expressing a T cell receptor comprising TRBC1 or TRBC2, and/or alter the tumor stroma, e.g., alter the tumor microenvironment near the cancer site. Increasing the proximity and/or activity of the immune cell using the multispecific molecules described herein is expected to enhance an immune response against the target cell (e.g., the cancer cell, e.g., lymphoma cell), thereby providing a more effective therapy (e.g., a more effective cancer therapy). Without being bound by theory, a targeted, localized immune response against the target cell (e.g., the cancer cell) is believed to reduce the effects of systemic toxicity of the multispecific molecules described herein. Furthermore, in the case where the target cancer cell is a T cell (e.g., a T cell expressing a T cell receptor comprising TRBC1 or TRBC2), a targeted immune response against the cancerous T cell population that targets non-cancerous T cells to a lesser degree (e.g., does not target non-cancerous T cells) is believed to have fewer deleterious effects than systemic ablation of all T cells.

[0974] Without wishing to be bound by theory, clonally derived T cell lymphomas are positive for either TRBC1 or TRBC2, but not both. In the case of TRBC1+ T cell malignancies, an anti-TRBC1 molecule disclosed herein (e.g., a multifunctional molecule that binds to TRBC1 and NKp30) may deplete TRBC1+ cells while sparing TRBC2+ non-malignant T cells. Similarly, in the case of TRBC2+ T cell malignancies, an anti-TRBC2 molecule disclosed herein (e.g., a multifunctional molecule that binds to TRBC2 and NKp30) may deplete TRBC2+ cells while sparing TRBC1+ non-malignant T cells.

[0975] Without wishing to be bound by theory, in some embodiments, a multifunctional molecule disclosed herein (e.g., anti-TRBC1/NKp30 antibody) only activates NK cells in the presence of a TRBC1-expressing cell. Without wising to be bound by theory, in some embodiments, a multifunctional molecule disclosed herein (e.g., anti-TRBC2/NKp30 antibody) only activates NK cells in the presence of a TRBC2-expressing cell.

[0976] Accordingly, provided herein are, inter alia, multispecific molecules (e.g., multispecific or multifunctional antibody molecules) that include the aforesaid moieties, nucleic acids encoding the same, methods of producing the aforesaid molecules, and methods of treating a cancer using the aforesaid molecules.

[0977] In an aspect, the disclosure features a method of detecting TRBC1 or TRBC2 in a sample or subject, comprising: contacting the sample or subject with an anti-TRBC1 antibody molecule described herein or an anti-TRBC2 antibody molecule described herein; and detecting formation of a complex between the antibody molecule and the sample or subject, thereby detecting TRBC1 or TRBC2.

[0978] In some embodiments, TRBC1 or TRBC2 is detected in vitro or in vivo.

[0979] In some embodiments, the method further comprises contacting a reference sample or subject with the antibody molecule; and detecting formation of a complex between the antibody molecule and the reference sample or subject, wherein a change, e.g., a statistically significant change, in the formation of the complex in the sample or subject, relative to the reference sample or subject is indicative of the presence of TRBC1 or TRBC2 in the sample or subject.

[0980] In some embodiments, the method further comprises obtaining a sample from a subject.

[0981] In some embodiments, the sample comprises one or more of plasma, tissue (e.g., cancerous tissue), biopsy, blood (e.g., whole blood), PBMCs, bone marrow, and/or lymphatic tissue, e.g., lymph node. In some embodiments, the sample has not been frozen and/or fixed. In some embodiments, the sample has been formalin-fixed (e.g., formalin-fixed, paraffin-embedded (FFPE). In some embodiments, the sample has been stained (e.g., for analysis by immunohistochemistry). In some embodiments, the sample has been frozen and/or fixed.

[0982] In some embodiments, the subject has, or is at risk of having, a disease or disorder described herein (e.g., cancer, e.g., a lymphoma, e.g., a T cell lymphoma).

[0983] In some embodiments, the method further comprises performing a flow cytometry analysis, e.g., using a multi-panel method. In some embodiments, the method further comprises performing an immunohistochemical (IHC) analysis, e.g. monochrome or in a multiplexed format. In some embodiments, the IHC method comprises brightfield chromogenic IHC. In embodiments, the brightfield chromogenic IHC method comprises direct detection of antigens by primary antibodies, e.g., which are directly labeled with different chromogens. In some embodiments, the IHC method comprises fluorescent IHC. In embodiments, the fluorescent IHC method comprises direct detection of antigens by primary antibodies, e.g., which are directly labeled with different fluorophores. In some embodiments, the method further comprises performing immunohistochemistry on a sample, e.g., a fixed sample, e.g., an FFPE sample. In some embodiments, the method further comprises assessing T-cell clonality, e.g., to determine the presence and/or level of T cell malignancy. In some embodiments, the method further comprises measuring the level of TRBC1+ or TRBC2+ cells from the biological sample (e.g., determining if TRBC1+ or TRBC2+ cells are depleted, e.g., relative to a reference sample or subject. In some embodiments, the method further comprises measuring the intracellular level of TRBC1 or TRBC2. In some embodiments, the method further comprises measuring the membrane level of TRBC1 or TRBC2.

[0984] In some embodiments, the method comprises combining two or more of the detection methods described herein. In embodiments, the method comprises a nucleic acid-based method and an antibody-based method.

[0985] In some embodiments, the method further comprises evaluating the subject for a change in prognosis, severity, or presence or absence of a disease or disorder (e.g., cancer), e.g., after treatment (e.g., with an antibody molecule described herein).

[0986] In some embodiments, the antibody molecule is detectably labeled. In some embodiments, the antibody molecule is an anti-TRBC1 antibody molecule. In some embodiments, the antibody molecule is an anti-TRBC2 antibody molecule.

[0987] In an aspect, the disclosure features a method of evaluating (e.g., identifying) a subject, comprising: contacting a sample (e.g., a sample described herein) from the subject with an anti-TRBC1 antibody molecule described herein or an anti-TRBC2 antibody molecule described herein; and

[0988] detecting formation of a complex between the antibody molecule and the sample, thereby evaluating the subject.

[0989] In some embodiments, the subject has, or is at risk of having, a disease or disorder described herein (e.g., cancer, e.g., a lymphoma, e.g., a T cell lymphoma). In some embodiments, the subject has not been treated with an antibody molecule described herein. In some embodiments, the subject has been treated with an antibody molecule described herein.

[0990] In an aspect, the disclosure features a kit comprising an anti-TRBC1 antibody molecule described herein or an anti-TRBC2 antibody molecule described herein and instructions for use in a method of detecting TRBC1 or TRBC2 in a sample or subject, e.g., in accordance with a method described herein.

### Exemplary Embodiment 2

[0991] In one aspect, provided herein is a multifunctional molecule comprising (i) a first antigen binding domain that binds to T cell receptor beta chain constant domain 1 (TRBC1) or T cell receptor beta chain constant domain 2 (TRBC2), and (ii) a second antigen binding domain that binds to NKp30.

[0992] In some embodiments, the first antigen binding domain binds to TRBC2. In some embodiments, the first antigen binding domain comprises one or more CDRs, framework regions, variable regions, or antigen binding domains disclosed in any of Tables 21-25, or a sequence having at least 85%, 90%, 95%, or 99% identity thereto. In some embodiments, the first antigen binding domain comprises a VH comprising a heavy chain complementarity determining region 1 (VHCDR1), a VHCDR2, and a VHCDR3, and a VL comprising a light chain complementarity determining region 1 (VLCDR1), a VLCDR2, and a VLCDR3. In some embodiments, the VHCDR1, VHCDR2, and VHCDR3 comprise the amino acid sequences of GXlX2MH, wherein X1 is Y or F, and X2 is P, H, V, Y, K, or A, and SEQ ID NOs: 201 and 7442, respectively. In some embodiments, the VLCDR1, VLCDR2, and VLCDR3 comprise the amino acid sequences of SEQ ID NOs: 7443, 224, and 225, respectively. In some embodiments, the VHCDR1, VHCDR2, VHCDR3, VLCDR1, VLCDR2, and VLCDR3 comprise the amino acid sequences of GXlX2MH, wherein X1 is Y or F, and X2 is P, H, V, Y, K, or A, and SEQ ID NOs: 201, 7442, 7443, 224, and 225, respectively. In some embodiments, VHCDR1, VHCDR2, and VHCDR3 comprise the amino acid sequences of: SEQ ID NOs: 7422, 201, and 7403, respectively; SEQ ID NOs: 7401, 201, and 7403, respectively; SEQ ID NOs: 7394, 201, and 7396, respectively; SEQ ID NOs: 7346, 201, and 7398, respectively; SEQ ID NOs: 7346, 201, and 7400, respectively; SEQ ID NOs: 7405, 201, and 7403, respectively; SEQ ID NOs: 7407, 201, and 7403, respectively; SEQ ID NOs: 7427, 201, and 7403, respectively; or SEQ ID NOs: 7430, 201, and 7403, respectively. In some embodiments, the VLCDR1, VLCDR2, and VLCDR3 comprise the amino acid sequences of: SEQ ID NOs: 7410, 224, and 225, respectively; or SEQ ID NOs: 7409, 224, and 225, respectively. In some embodiments, the VHCDR1, VHCDR2, VHCDR3, VLCDR1, VLCDR2, and VLCDR3 comprise the amino acid sequences of: SEQ ID NOs: 7422, 201, 7403, 7410, 224, and 225, respectively; SEQ ID NOs: 7401, 201, 7403, 7410, 224, and 225, respectively; SEQ ID NOs: 7394, 201, 7396, 7410, 224, and 225, respectively; SEQ ID NOs: 7346, 201, 7398, 7410, 224, and 225, respectively; SEQ ID NOs: 7346, 201, 7400, 7410, 224, and 225, respectively; SEQ ID NOs: 7405, 201, 7403, 7410, 224, and 225, respectively; SEQ ID NOs: 7407, 201, 7403, 7410, 224, and 225, respectively; SEQ ID NOs: 7427, 201, 7403, 7410, 224, and 225, respectively; SEQ ID NOs: 7430, 201, 7403, 7410, 224, and 225, respectively; SEQ ID NOs: 7422, 201, 7403, 7409, 224, and 225, respectively; SEQ ID NOs: 7401, 201, 7403, 7409, 224, and 225, respectively; SEQ ID NOs: 7394, 201, 7396, 7409, 224, and 225, respectively; SEQ ID NOs: 7346, 201, 7398, 7409, 224, and 225, respectively; SEQ ID NOs: 7346, 201, 7400, 7409, 224, and 225, respectively; SEQ ID NOs: 7405, 201, 7403, 7409, 224, and 225, respectively; SEQ ID NOs: 7407, 201, 7403, 7409, 224, and 225, respectively; SEQ ID NOs: 7427, 201, 7403, 7409, 224, and 225, respectively; or SEQ ID NOs: 7430, 201, 7403, 7409, 224, and 225, respectively. In some embodiments, the VH comprises an amino acid sequence selected from the group consisting of SEQ ID NOs: 7420, 7423, 7411, 7412, 7413, 7414, 7415, 7416, 7417, 7425, 7428, and 7431 (or a sequence having at least 85%, 90%, 95%, or 99% identity thereto). In some embodiments, the VL comprises an amino acid sequence selected from the group consisting of SEQ ID NOs: 7419 and 7418 (or a sequence having at least 85%, 90%, 95%, or 99% identity thereto). In some embodiments, the VH and VL comprise the amino acid sequences of: SEQ ID NOs: 7420 and 7419, respectively (or a sequence having at least 85%, 90%, 95%, or 99% identity thereto); SEQ ID NOs: 7423 and 7419, respectively (or a sequence having at least 85%, 90%, 95%, or 99% identity thereto); SEQ ID NOs: 7411 and 7419, respectively (or a sequence having at least 85%, 90%, 95%, or 99% identity thereto); SEQ ID NOs: 7412 and 7419, respectively (or a sequence having at least 85%, 90%, 95%, or 99% identity thereto); SEQ ID NOs: 7413 and 7419, respectively (or a sequence having at least 85%, 90%, 95%, or 99% identity thereto); SEQ ID NOs: 7414 and 7419, respectively (or a sequence having at least 85%, 90%, 95%, or 99% identity thereto); SEQ ID NOs: 7415 and 7419, respectively (or a sequence having at least 85%, 90%, 95%, or 99% identity thereto); SEQ ID NOs: 7416 and 7419, respectively (or a sequence having at least 85%, 90%, 95%, or 99% identity thereto); SEQ ID NOs: 7417 and 7419, respectively (or a sequence having at least 85%, 90%, 95%, or 99% identity thereto); SEQ ID NOs: 7425 and 7419, respectively (or a sequence having at least 85%, 90%, 95%, or 99% identity thereto); SEQ ID NOs: 7428 and 7419, respectively (or a sequence having at least 85%, 90%, 95%, or 99% identity thereto); SEQ ID NOs: 7431 and 7419, respectively (or a sequence having at least 85%, 90%, 95%, or 99% identity thereto); SEQ ID NOs: 7420 and 7418, respectively (or a sequence having at least 85%, 90%, 95%, or 99% identity thereto); SEQ ID NOs: 7423 and 7418, respectively (or a sequence having at least 85%, 90%, 95%, or 99% identity thereto); SEQ ID NOs: 7411 and 7418, respectively (or a sequence having at least 85%, 90%, 95%, or 99% identity thereto); SEQ ID NOs: 7412 and 7418, respectively (or a sequence having at least 85%, 90%, 95%, or 99% identity thereto); SEQ ID NOs: 7413 and 7418, respectively (or a sequence having at least 85%, 90%, 95%, or 99% identity thereto); SEQ ID NOs: 7414 and 7418, respectively (or a sequence having at least 85%, 90%, 95%, or 99% identity thereto); SEQ ID NOs: 7415 and 7418, respectively (or a sequence having at least 85%, 90%, 95%, or 99% identity thereto); SEQ ID NOs: 7416 and 7418, respectively (or a sequence having at least 85%, 90%, 95%, or 99% identity thereto); SEQ ID NOs: 7417 and 7418, respectively (or a sequence having at least 85%, 90%, 95%, or 99% identity thereto); SEQ ID NOs: 7425 and 7418, respectively (or a sequence having at least 85%, 90%, 95%, or 99% identity thereto); SEQ ID NOs: 7428 and 7418, respectively (or a sequence having at least 85%, 90%, 95%, or 99% identity thereto); SEQ ID NOs: 7431 and 7418, respectively (or a sequence having at least 85%, 90%, 95%, or 99% identity thereto).

[0993] In some embodiments, the first antigen binding domain has a higher affinity for a T cell receptor comprising TRBC2 than for a T cell receptor not comprising TRBC2, optionally wherein the KD for the binding between the first antigen binding domain and TRBC2 is no more than 40%, 30%, 20%, 10%, 1%, 0.1%, or 0.01% of the KD for the binding between the first antigen binding domain and a T cell receptor not comprising TRBC2. In some embodiments, the first antigen binding domain has a higher affinity for a T cell receptor comprising TRBC2 than for a T cell receptor comprising TRBC1, optionally wherein the K_{D} for the binding between the first antigen binding domain and TRBC2 is no more than 40%, 30%, 20%, 10%, 1%, 0.1%, or 0.01% of the K_{D} for the binding between the first antigen binding domain and a T cell receptor comprising TRBC1. In some embodiments, binding of the first antigen binding domain to TRBC2 on a lymphoma cell or lymphocyte, e.g., T cell, does not appreciably activate the lymphoma cell or lymphocyte, e.g., T cell, e.g., as measured by T cell proliferation, expression of a T cell activation marker (e.g., CD69 or CD25), and/or expression of a cytokine (e.g., TNFα and IFNγ). In some embodiments, the multifunctional molecule does not activate NK cells or does not substantially activate NK cells in the absence of a TRBC2-expressing cell.

[0994] In some embodiments, the first antigen binding domain binds to TRBC1. In some embodiments, the first antigen binding domain comprises one or more CDRs, framework regions, variable regions, or antigen binding domains disclosed in any of Tables 2, 3, 3A, 3B, 4, 5, 6 and 19, or a sequence having at least 85%, 90%, 95%, or 99% identity thereto. In some embodiments, the first antigen binding domain comprises a VH comprising a heavy chain complementarity determining region 1 (VHCDR1), a VHCDR2, and a VHCDR3, and a VL comprising a light chain complementarity determining region 1 (VLCDR1), a VLCDR2, and a VLCDR3, wherein the VHCDR1, VHCDR2, and VHCDR3 comprise the amino acid sequences of: SEQ ID NOs: 7346, 7355, and 202, respectively; SEQ ID NOs: 7346, 201, and 202, respectively; SEQ ID NOs: 7354, 201, and 202, respectively; or SEQ ID NOs: 7354, 7355, and 202, respectively. In some embodiments, the VLCDR1, VLCDR2, and VLCDR3 comprise the amino acid sequences of: SEQ ID NOs: 223, 224, and 225, respectively; SEQ ID NOs: 7367, 224, and 225, respectively; SEQ ID NOs: 223, 7368, and 225, respectively; SEQ ID NOs: 223, 224, and 7369, respectively; or SEQ ID NOs: 7367, 7368, and 7369, respectively. In some embodiments, the VHCDR1, VHCDR2, VHCDR3, VLCDR1, VLCDR2, and VLCDR3 comprise the amino acid sequences of: SEQ ID NOs: 7346, 7355, 202, 223, 224, and 225, respectively; SEQ ID NOs: 7346, 201, 202, 223, 224, and 225, respectively; SEQ ID NOs: 7346, 7355, 202, 7367, 224, and 225, respectively; SEQ ID NOs: 7346, 7355, 202, 223, 7368, and 225, respectively; SEQ ID NOs: 7346, 7355, 202, 223, 224, and 7369, respectively; SEQ ID NOs: 7346, 7355, 202, 7367, 7368, and 7369, respectively; SEQ ID NOs: 7346, 201, 202, 7367, 224, and 225, respectively; SEQ ID NOs: 7346, 201, 202, 223, 7368, and 225, respectively; SEQ ID NOs: 7346, 201, 202, 223, 224, and 7369, respectively; SEQ ID NOs: 7346, 201, 202, 7367, 7368, and 7369, respectively; SEQ ID NOs: 7354, 201, 202, 223, 224, and 225, respectively; SEQ ID NOs: 7354, 201, 202, 7367, 224, and 225, respectively; SEQ ID NOs: 7354, 201, 202, 223, 7368, and 225, respectively; SEQ ID NOs: 7354, 201, 202, 223, 224, and 7369, respectively; SEQ ID NOs: 7354, 201, 202, 7367, 7368, and 7369, respectively; SEQ ID NOs: 7354, 7355, 202, 223, 224, and 225, respectively; SEQ ID NOs: 7354, 7355, 202, 7367, 224, and 225, respectively; SEQ ID NOs: 7354, 7355, 202, 223, 7368, and 225, respectively; SEQ ID NOs: 7354, 7355, 202, 223, 224, and 7369, respectively; or SEQ ID NOs: 7354, 7355, 202, 7367, 7368, and 7369, respectively. In some embodiments, the VH comprises an amino acid sequence selected from the group consisting of SEQ ID NOs: 7351, 253, 250-252, 254, 7343, 7344, 7350, and 7352 (or a sequence having at least 85%, 90%, 95%, or 99% identity thereto) and/or the VL comprises an amino acid sequence selected from the group consisting of SEQ ID NOs: 258, 255-257, 259, 260, and 7357-7360 (or a sequence having at least 85%, 90%, 95%, or 99% identity thereto). In some embodiments, the VH and VL comprise the amino acid sequences of: SEQ ID NOs: 7351 and 258, respectively (or a sequence having at least 85%, 90%, 95%, or 99% identity thereto); or SEQ ID NOs: 253 and 258, respectively (or a sequence having at least 85%, 90%, 95%, or 99% identity thereto).

[0995] In some embodiments, the first antigen binding domain has a higher affinity for a T cell receptor comprising TRBC1 than for T cell receptors not comprising TRBC1, optionally wherein the KD for the binding between the first antigen binding domain and TRBC1 is no more than 40%, 30%, 20%, 10%, 1%, 0.1%, or 0.01% of the KD for the binding between the first antigen binding domain and a T cell receptor not comprising TRBC1. In some embodiments, the first antigen binding domain has a higher affinity for a T cell receptor comprising TRBC1 than for T cell receptors comprising TRBC2, optionally wherein the K_{D} for the binding between the first antigen binding domain and TRBC1 is no more than 40%, 30%, 20%, 10%, 1%, 0.1%, or 0.01% of the K_{D} for the binding between the first antigen binding domain and a T cell receptor comprising TRBC2. In some embodiments, binding of the first antigen binding domain to TRBC1 on a lymphoma cell or lymphocyte, e.g., T cell, does not appreciably activate the lymphoma cell or lymphocyte, e.g., T cell, (e.g., as measured by T cell proliferation, expression of a T cell activation marker (e.g., CD69 or CD25), and/or expression of a cytokine (e.g., TNFα and IFNγ). In some embodiments, the multifunctional molecule does not activate NK cells or does not substantially activate NK cells in the absence of a TRBC1-expressing cell.

[0996] In some embodiments, the second antigen binding domain comprises one or more CDRs, framework regions, variable regions, or antigen binding domains disclosed in any of Tables 7, 8, 8A, 8B, 9, 10, 18, and 25, or a sequence having at least 85%, 90%, 95%, or 99% identity thereto. In some embodiments, the second antigen binding domain comprises a VH comprising a heavy chain complementarity determining region 1 (VHCDR1), a VHCDR2, and a VHCDR3, and a VL comprising a light chain complementarity determining region 1 (VLCDR1), a VLCDR2, and a VLCDR3, wherein the VHCDR1, VHCDR2, and VHCDR3 of the second antigen binding domain comprise the amino acid sequences of: SEQ ID NOs: 7313, 6001, and 7315, respectively; SEQ ID NOs: 7313, 6001, and 6002, respectively; SEQ ID NOs: 7313, 6008, and 6009, respectively; SEQ ID NOs: 7313, 7385, and 7315, respectively; SEQ ID NOs: 7313, 7318, and 6009, respectively; SEQ ID NOs: 375, 377, and 379, respectively; SEQ ID NOs: 389, 391, and 393, respectively; SEQ ID NOs: 403, 405, and 407, respectively; SEQ ID NOs: 417, 419, and 421, respectively; SEQ ID NOs: 431, 433, and 435, respectively; SEQ ID NOs: 445, 447, and 449, respectively; SEQ ID NOs: 459, 461, and 463, respectively; or SEQ ID NOs: 472, 474, and 476, respectively. In some embodiments, the VLCDR1, VLCDR2, and VLCDR3 of the second antigen binding domain comprise the amino acid sequences of: SEQ ID NOs: 7326, 7327, and 7329, respectively; SEQ ID NOs: 6063, 6064, and 7293, respectively; SEQ ID NOs: 6070, 6071, and 6072, respectively; SEQ ID NOs: 6070, 6064, and 7321, respectively; SEQ ID NOs: 382, 384, and 386, respectively; SEQ ID NOs: 396, 398, and 400, respectively; SEQ ID NOs: 410, 412, and 414, respectively; SEQ ID NOs: 424, 426, and 428, respectively; SEQ ID NOs: 438, 440, and 442, respectively; SEQ ID NOs: 452, 454, and 456, respectively; SEQ ID NOs: 466, 468, and 469, respectively; SEQ ID NOs: 479, 481, and 483, respectively.

[0997] In some embodiments, the VHCDR1, VHCDR2, VHCDR3, VLCDR1, VLCDR2, and VLCDR3 of the second antigen binding domain comprise the amino acid sequences of: SEQ ID NOs: 7313, 6001, 7315, 7326, 7327, and 7329, respectively; SEQ ID NOs: 7313, 6001, 6002, 6063, 6064, and 7293, respectively; SEQ ID NOs: 7313, 6008, 6009, 6070, 6071, and 6072, respectively; SEQ ID NOs: 7313, 7385, 7315, 6070, 6064, and 7321, respectively; SEQ ID NOs: 7313, 7318, 6009, 6070, 6064, and 7321, respectively; SEQ ID NOs: 375, 377, 379, 382, 384, and 386, respectively; SEQ ID NOs: 389, 391, 393, 396, 398, and 400, respectively; SEQ ID NOs: 403, 405, 407, 410, 412, and 414, respectively; SEQ ID NOs: 417, 419, 421, 424, 426, and 428, respectively; SEQ ID NOs: 431, 433, 435, 438, 440, and 442, respectively; SEQ ID NOs: 445, 447, 449, 452, 454, and 456, respectively; SEQ ID NOs: 459, 461, 463, 466, 468, and 469, respectively; or SEQ ID NOs: 472, 474, 476, 479, 481, and 483, respectively.

[0998] In some embodiments, the VH of the second antigen binding domain comprises an amino acid sequence selected from the group consisting of SEQ ID NOs: 7302, 7298, 7300, 7301, 7303, and 7304 (or a sequence having at least 85%, 90%, 95%, or 99% identity thereto) and/or the VL of the second antigen binding domain comprises an amino acid sequence selected from the group consisting of SEQ ID NOs: 7309, 7305, 7299, 7306-7308 (or a sequence having at least 85%, 90%, 95%, or 99% identity thereto). In some embodiments, the VH of the second antigen binding domain comprises an amino acid sequence selected from the group consisting of SEQ ID NOs: 6121 or 6123-6128 (or a sequence having at least 85%, 90%, 95%, or 99% identity thereto) and/or the VL of the second antigen binding domain comprises an amino acid sequence selected from the group consisting of SEQ ID NOs: 7294 or 6137-6141 (or a sequence having at least 85%, 90%, 95%, or 99% identity thereto). In some embodiments, the VH of the second antigen binding domain comprises an amino acid sequence selected from the group consisting of SEQ ID NOs: 6122 or 6129-6134 (or a sequence having at least 85%, 90%, 95%, or 99% identity thereto) and/or the VL of the second antigen binding domain comprises an amino acid sequence selected from the group consisting of SEQ ID NOs: 6136 or 6142-6147 (or a sequence having at least 85%, 90%, 95%, or 99% identity thereto). In some embodiments, the VH of the second antigen binding domain comprises an amino acid sequence selected from the group consisting of SEQ ID NOs: 357-364 (or a sequence having at least 85%, 90%, 95%, or 99% identity thereto); and/or the VL of the second antigen binding domain comprises an amino acid sequence selected from the group consisting of SEQ ID NOs: 365-372 (or a sequence having at least 85%, 90%, 95%, or 99% identity thereto). In some embodiments, the VH and VL of the second antigen binding domain comprise the amino acid sequences of: SEQ ID NOs: 7302 and 7309, respectively (or a sequence having at least 85%, 90%, 95%, or 99% identity thereto); or SEQ ID NOs: 7302 and 7305, respectively (or a sequence having at least 85%, 90%, 95%, or 99% identity thereto). In some embodiments, the second antigen binding domain comprise the amino acid sequences of: SEQ ID NO: 7311 or 7310 (or a sequence having at least 85%, 90%, 95%, or 99% identity thereto); SEQ ID NO: 6187 or 6188 (or a sequence having at least 85%, 90%, 95%, or 99% identity thereto); SEQ ID NO: 6189 or 6190 (or a sequence having at least 85%, 90%, 95%, or 99% identity thereto); any of SEQ ID NOs: 373 and 485-491.

[0999] In some embodiments, the multifunctional molecule binds to TRBC2 monovalently. In some embodiments, the multifunctional molecule comprises a configuration shown in any of FIGS. 30A-30D, optionally wherein: (i) the multifunctional antibody molecule comprises an anti-TRBC2 Fab and an anti-NKp30 scFv, e.g., comprises a configuration shown in FIG. 30A; (ii) the multifunctional antibody molecule comprises an anti-TRBC2 Fab and an anti-NKp30 Fab, e.g., comprises a configuration shown in FIG. 30B; (iii) the multifunctional antibody molecule comprises an anti-NKp30 Fab and an anti-TRBC2 scFv, e.g., comprises a configuration shown in FIG. 30C; or (iv) the multifunctional antibody molecule comprises an anti-TRBC2 scFv and an anti-NKp30 scFv, e.g., comprises a configuration shown in FIG. 30D.

[1000] In some embodiments, the multifunctional molecule binds to TRBC1 monovalently. In some embodiments, the multifunctional molecule comprises a configuration shown in any of FIGS. 29A-29D, optionally wherein: (i) the multifunctional antibody molecule comprises an anti-TRBC1 Fab and an anti-NKp30 scFv, e.g., comprises a configuration shown in FIG. 29A; (ii) the multifunctional antibody molecule comprises an anti-TRBC1 Fab and an anti-NKp30 Fab, e.g., comprises a configuration shown in FIG. 29B; (iii) the multifunctional antibody molecule comprises an anti-NKp30 Fab and an anti-TRBC1 scFv, e.g., comprises a configuration shown in FIG. 29C; or (iv) the multifunctional antibody molecule comprises an anti-TRBC1 scFv and an anti-NKp30 scFv, e.g., comprises a configuration shown in FIG. 29D.

[1001] In some embodiments, a multifunctional molecule disclosed herein further comprises a dimerization module comprising one or more immunoglobulin chain constant regions (e.g., Fc regions) comprising one or more of: a paired cavity-protuberance (“knob-in-a hole”), an electrostatic interaction, or a strand-exchange.

[1002] In some embodiments, the multifunctional molecule comprises an anti-TRBC2 amino acid sequence disclosed in any of Tables 21-25, or a sequence having at least 85%, 90%, 95%, or 99% identity thereto, and/or an anti-NKp30 amino acid sequence disclosed in any of Tables 7, 8, 8A, 8B, 9, 10, 18, and 25, or a sequence having at least 85%, 90%, 95%, or 99% identity thereto. In some embodiments, the multifunctional molecule comprises an anti-TRBC2 VH of SEQ ID NO: 7420 (or a sequence having at least 85%, 90%, 95%, or 99% identity thereto), an anti-TRBC2 VL of SEQ ID NO: 7419 (or a sequence having at least 85%, 90%, 95%, or 99% identity thereto), an anti-NKp30 VH of SEQ ID NO: 7302 (or a sequence having at least 85%, 90%, 95%, or 99% identity thereto), and an anti-NKp30 VL of SEQ ID NO: 7309 (or a sequence having at least 85%, 90%, 95%, or 99% identity thereto). In some embodiments, the multifunctional molecule comprises an anti-TRBC2 VH of SEQ ID NO: 7420 (or a sequence having at least 85%, 90%, 95%, or 99% identity thereto), an anti-TRBC2 VL of SEQ ID NO: 7419 (or a sequence having at least 85%, 90%, 95%, or 99% identity thereto), and an anti-NKp30 scFv of SEQ ID NO: 7311 (or a sequence having at least 85%, 90%, 95%, or 99% identity thereto). In some embodiments, the multifunctional molecule comprises SEQ ID NOs: 7438, 7439, and 7383 (or a sequence having at least 85%, 90%, 95%, or 99% identity thereto). In some embodiments, the multifunctional molecule comprises an anti-TRBC2 VH of SEQ ID NO: 7423 (or a sequence having at least 85%, 90%, 95%, or 99% identity thereto), an anti-TRBC2 VL of SEQ ID NO: 7419 (or a sequence having at least 85%, 90%, 95%, or 99% identity thereto), an anti-NKp30 VH of SEQ ID NO: 7302 (or a sequence having at least 85%, 90%, 95%, or 99% identity thereto), and an anti-NKp30 VL of SEQ ID NO: 7309 (or a sequence having at least 85%, 90%, 95%, or 99% identity thereto). In some embodiments, the multifunctional molecule comprises an anti-TRBC2 VH of SEQ ID NO: 7423 (or a sequence having at least 85%, 90%, 95%, or 99% identity thereto), an anti-TRBC2 VL of SEQ ID NO: 7419 (or a sequence having at least 85%, 90%, 95%, or 99% identity thereto), and an anti-NKp30 scFv of SEQ ID NO: 7311 (or a sequence having at least 85%, 90%, 95%, or 99% identity thereto). In some embodiments, the multifunctional molecule comprises SEQ ID NOs: 7440, 7439, and 7383 (or a sequence having at least 85%, 90%, 95%, or 99% identity thereto).

[1003] In some embodiments, the multifunctional molecule comprises an anti-TRBC1 amino acid sequence disclosed in any of Tables 2, 3, 3A, 3B, 4, 5, 6 and 19, or a sequence having at least 85%, 90%, 95%, or 99% identity thereto, and/or an anti-NKp30 amino acid sequence disclosed in any of Tables 7, 8, 8A, 8B, 9, 10, 18, and 19, or a sequence having at least 85%, 90%, 95%, or 99% identity thereto. In some embodiments, the multifunctional molecule comprises: (i) an anti-TRBC1 VH of SEQ ID NO: 7351 (or a sequence having at least 85%, 90%, 95%, or 99% identity thereto), an anti-TRBC1 VL of SEQ ID NO: 258 (or a sequence having at least 85%, 90%, 95%, or 99% identity thereto), an anti-NKp30 VH of SEQ ID NO: 7302 (or a sequence having at least 85%, 90%, 95%, or 99% identity thereto), and an anti-NKp30 VL of SEQ ID NO: 7309 (or a sequence having at least 85%, 90%, 95%, or 99% identity thereto); (ii) an anti-TRBC1 VH of SEQ ID NO: 7351 (or a sequence having at least 85%, 90%, 95%, or 99% identity thereto), an anti-TRBC1 VL of SEQ ID NO: 258 (or a sequence having at least 85%, 90%, 95%, or 99% identity thereto), and an anti-NKp30 scFv of SEQ ID NO: 7311 (or a sequence having at least 85%, 90%, 95%, or 99% identity thereto); or (iii) SEQ ID NOs: 7382, 7380, and 7383 (or a sequence having at least 85%, 90%, 95%, or 99% identity thereto). In some embodiments, the multifunctional molecule comprises: (i) an anti-TRBC1 VH of SEQ ID NO: 253 (or a sequence having at least 85%, 90%, 95%, or 99% identity thereto), an anti-TRBC1 VL of SEQ ID NO: 258 (or a sequence having at least 85%, 90%, 95%, or 99% identity thereto), an anti-NKp30 VH of SEQ ID NO: 7302 (or a sequence having at least 85%, 90%, 95%, or 99% identity thereto), and an anti-NKp30 VL of SEQ ID NO: 7309 (or a sequence having at least 85%, 90%, 95%, or 99% identity thereto); (ii) an anti-TRBC1 VH of SEQ ID NO: 253 (or a sequence having at least 85%, 90%, 95%, or 99% identity thereto), an anti-TRBC1 VL of SEQ ID NO: 258 (or a sequence having at least 85%, 90%, 95%, or 99% identity thereto), and an anti-NKp30 scFv of SEQ ID NO: 7311 (or a sequence having at least 85%, 90%, 95%, or 99% identity thereto); or (iii) SEQ ID NOs: 7379, 7380, and 7383 (or a sequence having at least 85%, 90%, 95%, or 99% identity thereto). In some embodiments, the multifunctional molecule comprises: (i) an anti-TRBC1 VH of SEQ ID NO: 7351 (or a sequence having at least 85%, 90%, 95%, or 99% identity thereto), an anti-TRBC1 VL of SEQ ID NO: 258 (or a sequence having at least 85%, 90%, 95%, or 99% identity thereto), an anti-NKp30 VH of SEQ ID NO: 7302 (or a sequence having at least 85%, 90%, 95%, or 99% identity thereto), and an anti-NKp30 VL of SEQ ID NO: 7305 (or a sequence having at least 85%, 90%, 95%, or 99% identity thereto); (ii) an anti-TRBC1 VH of SEQ ID NO: 7351 (or a sequence having at least 85%, 90%, 95%, or 99% identity thereto), an anti-TRBC1 VL of SEQ ID NO: 258 (or a sequence having at least 85%, 90%, 95%, or 99% identity thereto), and an anti-NKp30 scFv of SEQ ID NO: 7310 (or a sequence having at least 85%, 90%, 95%, or 99% identity thereto); or (iii) SEQ ID NOs: 7382, 7380, and 7384 (or a sequence having at least 85%, 90%, 95%, or 99% identity thereto). In some embodiments, the multifunctional molecule comprises: (i) an anti-TRBC1 VH of SEQ ID NO: 253 (or a sequence having at least 85%, 90%, 95%, or 99% identity thereto), an anti-TRBC1 VL of SEQ ID NO: 258 (or a sequence having at least 85%, 90%, 95%, or 99% identity thereto), an anti-NKp30 VH of SEQ ID NO: 7302 (or a sequence having at least 85%, 90%, 95%, or 99% identity thereto), and an anti-NKp30 VL of SEQ ID NO: 7305 (or a sequence having at least 85%, 90%, 95%, or 99% identity thereto); (ii) an anti-TRBC1 VH of SEQ ID NO: 253 (or a sequence having at least 85%, 90%, 95%, or 99% identity thereto), an anti-TRBC1 VL of SEQ ID NO: 258 (or a sequence having at least 85%, 90%, 95%, or 99% identity thereto), and an anti-NKp30 scFv of SEQ ID NO: 7310 (or a sequence having at least 85%, 90%, 95%, or 99% identity thereto); or (iii) SEQ ID NOs: 7379, 7380, and 7384 (or a sequence having at least 85%, 90%, 95%, or 99% identity thereto).

[1004] In some embodiments, the multifunctional molecule comprises: a heavy chain constant region variant, e.g., an Fc region variant, that comprises one or more mutations that result in reduced or ablated affinity for at least one Fc receptor, optionally wherein the one or more mutations result in reduced or ablated antibody dependent cell-mediated cytotoxicity (ADCC), Antibody-dependent cellular phagocytosis (ADCP), or complement dependent cytotoxicity (CDC). In some embodiments, the Fc region variant comprises one or more mutations disclosed in Table 20, optionally wherein the Fc region variant comprises an N297A mutation.

### Exemplary Embodiment 3

[1005] In an aspect, the disclosure features a multifunctional molecule, comprising:
[1006] (i) a first antigen binding domain that binds to T cell receptor beta chain constant domain 1 (TRBC1), and
[1007] (ii) a second antigen binding domain that binds to NKp30,
[1008] wherein the first antigen binding domain comprises one or more CDRs, framework regions, variable regions, or antigen binding domains disclosed in any of Tables 3A-3B or 4 (e.g., any of SEQ ID NOs: 261-356), or a sequence having at least 85%, 90%, 95%, or 99% identity thereto.

[1009] In some embodiments, the second antigen binding domain comprises one or more CDRs, framework regions, variable regions, or antigen binding domains disclosed herein.

[1010] In another aspect, the disclosure features a multifunctional molecule, comprising:
[1011] (i) a first antigen binding domain that binds to T cell receptor beta chain constant domain 1 (TRBC1), and
[1012] (ii) a second antigen binding domain that binds to NKp30,
[1013] wherein the second antigen binding domain comprises one or more CDRs, framework regions, variable regions, or antigen binding domains disclosed in any of Tables 8A-8B, 9, or 10 (e.g., any of SEQ ID NOs 357-484), or a sequence having at least 85%, 90%, 95%, or 99% identity thereto.

[1014] In some embodiments, the first antigen binding domain comprises one or more CDRs, framework regions, variable regions, or antigen binding domains disclosed herein.

[1015] In an aspect, the disclosure features a multifunctional molecule, comprising:
[1016] (i) a first antigen binding domain that binds to T cell receptor beta chain constant domain 1 (TRBC1), and
[1017] (ii) a second antigen binding domain that binds to NKp30,
[1018] wherein the first antigen binding domain comprises one or more CDRs, framework regions, variable regions, or antigen binding domains disclosed in any of Tables 3A-3B or 4 (e.g., any of SEQ ID NOs: 261-356), or a sequence having at least 85%, 90%, 95%, or 99% identity thereto; and
[1019] wherein the second antigen binding domain comprises one or more CDRs, framework regions, variable regions, or antigen binding domains disclosed in any of Tables 8A-8B, 9, or 10 (e.g., any of SEQ ID NOs 357-484), or a sequence having at least 85%, 90%, 95%, or 99% identity thereto.

### Exemplary Embodiment 4

[1020] In one aspect, provided herein is an antibody molecule that binds to TRBC2, comprising one or more CDRs, framework regions, variable regions, or antigen binding domains disclosed in any of Tables 21-25, or a sequence having at least 85%, 90%, 95%, or 99% identity thereto. In some embodiments, the antibody molecule that binds to TRBC2 comprises one or more CDRs (e.g., VHCDR1, VHCDR2, VHCDR3, VLCDR1, VLCDR2, and/or VLCDR3) disclosed in Table 21 or Table 22, or a sequence having at least 85%, 90%, 95%, or 99% identity thereto. In some embodiments, the antibody molecule that binds to TRBC2 comprises one or more framework regions (e.g., VHFWR1, VHFWR2, VHFWR3, VHFWR4, VLFWR1, VLFWR2, VLFWR3, and/or VLFWR4) disclosed in Table 21 or Table 22, or a sequence having at least 85%, 90%, 95%, or 99% identity thereto. In some embodiments, the antibody molecule that binds to TRBC2 comprises a VH and/or a VL disclosed in Table 23, or a sequence having at least 85%, 90%, 95%, or 99% identity thereto. In some embodiments, the antibody molecule that binds to TRBC2 comprises an amino acid sequence disclosed in Table 24, or a sequence having at least 85%, 90%, 95%, or 99% identity thereto.

[1021] In one aspect, provided herein is an antibody molecule that binds to NKp30, comprising one or more CDRs, framework regions, variable regions, or antigen binding domains disclosed in any of Tables 7, 8, 8A, 8B, 9, 10, 18, and 25, or a sequence having at least 85%, 90%, 95%, or 99% identity thereto.

[1022] In one aspect, provided herein is an antibody molecule that binds to TRBC1, comprising one or more CDRs, framework regions, variable regions, or antigen binding domains disclosed in any of Tables 2, 3, 3A, 3B, 4, 5, 6 and 19, or a sequence having at least 85%, 90%, 95%, or 99% identity thereto.

[1023] In some embodiments, the antibody molecule comprises a heavy chain constant region variant, e.g., an Fc region variant, that comprises one or more mutations that result in reduced or ablated affinity for at least one Fc receptor, optionally wherein the one or more mutations result in reduced or ablated antibody dependent cell-mediated cytotoxicity (ADCC), Antibody-dependent cellular phagocytosis (ADCP), or complement dependent cytotoxicity (CDC). In some embodiments, the Fc region variant comprises one or more mutations disclosed in Table 20, optionally wherein the Fc region variant comprises an N297A mutation.

[1024] In some embodiments, an amino acid sequence disclosed herein comprises a signal peptide of METDTLLLWVLLLWVPGSTG (SEQ ID NO: SEQ ID NO: 7444). In some embodiments, an amino acid sequence disclosed herein does not comprise a signal peptide of

(SEQ ID NO: SEQ ID NO: 7444)
METDTLLLWVLLLWVPGSTG

[1025] In one aspect, provide herein is a nucleic acid molecule encoding a multifunctional molecule disclosed herein or an antibody molecule disclosed herein. In one aspect, provide herein is a vector, e.g., an expression vector, comprising a nucleic acid molecule disclosed herein. In one aspect, provide herein is a cell comprising a nucleic acid molecule disclosed herein or a vector disclosed herein. In one aspect, provide herein is a pharmaceutical composition comprising a multifunctional molecule disclosed herein or an antibody molecule disclosed herein and a pharmaceutically acceptable carrier, excipient, or stabilizer.

[1026] In one aspect, provide herein is a method of making, e.g., producing, a multifunctional molecule disclosed herein or an antibody molecule disclosed herein, comprising culturing a cell disclosed herein, under suitable conditions, e.g., conditions suitable for gene expression and/or homo- or heterodimerization.

[1027] In one aspect, provide herein is a method of treating a cancer, comprising administering to a subject in need thereof a multifunctional molecule disclosed herein or an antibody molecule disclosed herein, wherein the multifunctional molecule or antibody molecule is administered in an amount effective to treat the cancer. In some embodiments, the method further comprises identifying, evaluating, or selecting a subject in need of treatment, wherein identifying, evaluating, or selecting comprises determining (e.g., directly determining or indirectly determining, e.g., obtaining information regarding) whether a subject has cancer cells that express a T cell receptor comprising TRBC1 or TRBC2. In some embodiments, the method further comprises: responsive to a determination that a subject has cancer cells that express a T cell receptor comprising TRBC2: optionally, selecting the subject for treatment with a multifunctional molecule comprising an antigen binding domain that binds to a T cell receptor comprising TRBC2, and administering a multifunctional molecule disclosed herein comprising an antigen binding domain that binds to a T cell receptor comprising TRBC2. In some embodiments, the method further comprises: responsive to a determination that a subject has cancer cells that express a T cell receptor comprising TRBC1: optionally, selecting the subject for treatment with a multifunctional molecule comprising an antigen binding domain that binds to a T cell receptor comprising TRBC1, and administering a multifunctional molecule disclosed herein comprising an antigen binding domain that binds to a T cell receptor comprising TRBC1.

[1028] In one aspect, provide herein is a method of treating a cancer, e.g., a lymphoma or leukemia, e.g., a T cell lymphoma or leukemia, comprising: responsive to a determination that a subject has cancer cells that express a T cell receptor comprising TRBC2, administering to the subject a multifunctional molecule disclosed herein, wherein the first antigen binding domain of the multifunctional molecule binds to TRBC2, wherein the multifunctional molecule is administered in an amount effective to treat the cancer. In one aspect, provide herein is a method of treating a cancer, e.g., a lymphoma or leukemia, e.g., a T cell lymphoma or leukemia, comprising: responsive to a determination that a subject has cancer cells that express a T cell receptor comprising TRBC1, administering to the subject a multifunctional molecule disclosed herein, wherein the first antigen binding domain of the multifunctional molecule binds to TRBC1, wherein the multifunctional molecule is administered in an amount effective to treat the cancer.

[1029] In one aspect, provide herein is a method of identifying a subject in need of treatment for cancer, e.g., a lymphoma or leukemia, e.g., a T cell lymphoma or leukemia, using a multifunctional molecule disclosed herein, comprising determining (e.g., directly determining or indirectly determining, e.g., obtaining information regarding) whether a subject has cancer cells that express a T cell receptor comprising TRBC1 or TRBC2, wherein:
[1030] responsive to a determination that the subject has cancer cells that express a T cell receptor comprising TRBC1, identifying the subject as a candidate for treatment using a multifunctional molecule comprising an antigen binding domain that binds to TRBC1, and optionally not as a candidate for treatment using a multifunctional molecule comprising an antigen binding domain that binds to TRBC2, or
[1031] responsive to a determination that the subject has cancer cells that express a T cell receptor comprising TRBC2, identifying the subject as a candidate for treatment using a multifunctional molecule comprising an antigen binding domain that binds to TRBC2, and optionally not as a candidate for treatment using a multifunctional molecule comprising an antigen binding domain that binds to TRBC1.

[1032] In some embodiments, the method further comprises:
[1033] responsive to identifying the subject as a candidate for treatment using a multifunctional molecule comprising an antigen binding domain that binds to TRBC1, treating the subject with (e.g., administering to the subject) a multifunctional molecule comprising an antigen binding domain that binds to TRBC1, or
[1034] responsive to identifying the subject as a candidate for treatment using a multifunctional molecule comprising an antigen binding domain that binds to TRBC2, treating the subject with (e.g., administering to the subject) a multifunctional molecule comprising an antigen binding domain that binds to TRBC2.

[1035] In some embodiments of the aforementioned methods, the cancer is leukemia or lymphoma. In some embodiments, the cancer is selected from Acquired immune deficiency syndrome (AIDS)-associated lymphoma, Angioimmunoblastic T-cell lymphoma, Adult T-cell leukemia/lymphoma, Burkitt lymphoma, Central nervous system (CNS) lymphoma, Diffuse large B-cell lymphoma (DLBCL), Lymphoblastic lymphoma, Mantle cell lymphoma (MCL), Peripheral T-cell lymphoma (PTCL) (e.g., Hepatosplenic T-cell lymphoma (HSGDTCL), Subcutaneous paniculitis-like T-cell lymphoma, or Enteropathy-associated T-cell lymphoma), Transformed follicular and transformed mucosa-associated lymphoid tissue (MALT) lymphomas, Cutaneous T-cell lymphoma (mycosis fungoides and Sézary syndrome), Follicular lymphoma, Lymphoplasmacytic lymphoma/Waldenström macroglobulinemia, Marginal zone B-cell lymphoma, Gastric mucosa-associated lymphoid tissue (MALT) lymphoma, Chronic lymphocytic leukemia/small-cell lymphocytic lymphoma (CLL/SLL), Extranodal T-/NK-cell lymphoma (nasal type), and Anaplastic large-cell lymphoma (e.g., primary cutaneous anaplastic large-cell lymphoma or systemic anaplastic large-cell lymphoma). In some embodiments, the cancer is Peripheral T-cell lymphoma (PTCL).

[1036] In one aspect, this invention provides a composition comprising a multifunctional molecule or an antibody molecule disclosed herein for use in a method of treating a subject having cancer.

[1037] Accordingly, in one aspect, the disclosure features multifunctional molecule, comprising: (i) a first antigen binding domain that selectively binds to T cell receptor beta chain constant domain 1 (TRBC1) or T cell receptor beta chain constant domain 2 (TRBC2),

[1038] and
[1039] (ii) one, two, or all of:
   [1040] (a) an immune cell engager chosen from an NK cell engager (e.g., a molecule that binds to NKp30, NKp46, NKG2D, or CD16), T cell engager (e.g., that binds to a T cell antigen other than CD3), a B cell engager, a dendritic cell engager, or a macrophage cell engager;
   [1041] (b) a cytokine molecule or cytokine inhibitor molecule;
   [1042] (c) a death receptor signal engager; and
   [1043] (d) a stromal modifying moiety.

[1044] In another aspect, the disclosure features a multifunctional molecule, comprising: (i) a first antigen binding domain that selectively targets lymphocytes expressing (e.g., on their surface, e.g., displaying) a T cell receptor comprising T cell receptor beta chain constant domain 1 (TRBC1), TRBC1, a T cell receptor comprising T cell receptor beta chain constant domain 2 (TRBC2), or TRBC2, and
[1045] (ii) one, two, or all of:
   [1046] (a) an immune cell engager chosen from an NK cell engager (e.g., a molecule that binds to NKp30, NKp46, NKG2D, or CD16), a T cell engager (e.g., that binds to a T cell antigen other than CD3), a B cell engager, a dendritic cell engager, or a macrophage cell engager;
   [1047] (b) a cytokine molecule or cytokine inhibitor molecule;
   [1048] (c) a death receptor signal engager; and
   [1049] (c) a stromal modifying moiety.

[1050] In another aspect, the disclosure features a multifunctional molecule, comprising:
[1051] (i) a first antigen binding domain that preferentially binds to a tumor antigen on a lymphoma cell (e.g., T cell), e.g., a T cell receptor comprising T cell receptor beta chain constant domain 1 (TRBC1), TRBC1, a T cell receptor comprising T cell receptor beta chain constant domain 2 (TRBC2), or TRBC2, and
[1052] (ii) one, two, or all of:
   [1053] (a) an immune cell engager chosen from an NK cell engager (e.g., a molecule that binds to NKp30, NKp46, NKG2D, or CD16), a T cell engager (e.g., that binds to a T cell antigen other than CD3), a B cell engager, a dendritic cell engager, or a macrophage cell engager;
   [1054] (b) a cytokine molecule or cytokine inhibitor molecule;
   [1055] (c) a death receptor signal engager; and
   [1056] (d) a stromal modifying moiety.

[1057] In another aspect, the disclosure features an antibody molecule, e.g., an IgM antibody molecule, comprising:
[1058] (i) a first antigen binding domain that selectively binds to T cell receptor beta chain constant domain 1 (TRBC1) or T cell receptor beta chain constant domain 2 (TRBC2), and
[1059] (ii) a complement activating domain that activates the complement pathway, e.g., by binding C1q.

[1060] In another aspect, the disclosure features a nucleic acid molecule encoding a multifunctional molecule disclosed herein.

[1061] In another aspect, the disclosure features a vector, e.g., an expression vector, comprising the nucleic acid molecules disclosed herein.

[1062] In another aspect, the disclosure features a host cell comprising a nucleic acid molecule or vector disclosed herein.

[1063] In another aspect, the disclosure features a method of making, e.g., producing, a multifunctional molecule disclosed herein, comprising culturing a host cell disclosed herein under suitable conditions, e.g., conditions suitable for gene expression and/or homo- or heterodimerization.

[1064] In another aspect, the disclosure features a pharmaceutical composition comprising a multifunctional molecule disclosed herein.

[1065] In another aspect, the disclosure features a method of treating a cancer, comprising administering to a subject in need thereof a multifunctional molecule disclosed herein, wherein the multifunctional molecule is administered in an amount effective to treat the cancer. In some embodiments, the cancer is a T cell malignancy, e.g., a T cell lymphoma or a T cell leukemia. In some embodiments, the cancer is chosen from: T cell prolymphocytic leukemia, T cell large granular lymphocytic leukemia, Systemic EBV positive T cell lymphoproliferative disease of childhood, Hydroa vaccineform-like lymphoma, PTCL, PTCL-NOS (Not Otherwise Specified), Angioimmunoblastic T-cell lymphoma (AITL), Anaplastic Large cell Lymphoma (ALCT) ALK positive and ALK negative, Primary cutaneous anaplastic large cell lymphoma, Primary cutaneous gd Tcell lymphoma, Primary cutaneous CD8 poasitive aggressive epidermotropic cytotoxic T cell lymphoma, Primary cutaneous CD4 positive small/medium T cell lymphoma, Extranodal T cell lymphoma, Enteropathy-associated T cell Lymphoma (EATL), Hepatoslenic T cell lymphoma, Cutaneous T cell Lymphoma (CTCL) including CD 30 positive T cell lymphoproliferative disorders, Subcutanoeus panniculitis-like T cell lymphoma, Mycosis fugoides, Sezary Syndrome, lymphomatoid papulosis, T-cell Acute Lymphoblastic Leukemia (T-ALL), Adult T cell lymphoma, Monoclonal T cell proliferation of unknown significance, anaplastic large cell lymphoma (ALCL); angioimmunoblastic T cell lymphoma; peripheral T cell lymphoma (PTCL), not otherwise specified (NOS); cutaneous T-cell lymphoma (CTCL); NKT cell lymphoma; Sézary syndrome; T acute lymphoblastic leukemia or lymphoma; adult T cell leukemia or lymphoma; T prolymphocytic leukemia; and T large granular leukemia. In some embodiments, the cancer is PTCL. In some embodiments, TRBC subtype expression is analyzed by flow cytometry analysis of, e.g., fresh tumor tissue, or by immunohistochemistry (IHC) on fixed tissue (e.g., FFPE tissue). In some embodiments, the multifunctional molecule is used in combination with a second agent. In some embodiments, the second agent is a histone deacetylases (HDAC) inhibitor, e.g., romidepsin or belinostat. In some embodiments, the second agent is a kinase or enzyme inhibitor. In some embodiments, the second agent is a PI3K inhibitor, e.g., duvelisib. In some embodiments, the second agent is a farnesyltransferase inhibitor, e.g., tipifarnib. In some embodiments, the second agent is a SYK/JAK inhibitor, e.g., cerdulatinib. In some embodiments, the second agent is a chemotherapy. In some embodiments, the second agent is an anti-CD30 antibody. In some embodiments, the second agent is an IMiD.

[1066] In another aspect, the disclosure features a method of identifying a subject in need of treatment for cancer using a multifunctional molecule disclosed herein, comprising determining (e.g., directly determining or indirectly determining, e.g., obtaining information regarding) whether a subject has cancer cells that express a T cell receptor comprising TRBC1 or TRBC2, wherein: responsive to determining that the subject has cancer cells that express a T cell receptor comprising TRBC1, identifying the subject as a candidate for treatment using a multifunctional molecule comprising an antigen binding domain that binds to TRBC1, and optionally not as a candidate for treatment using a multifunctional molecule comprising an antigen binding domain that binds to TRBC2, and
[1067] responsive to determining that the subject has cancer cells that express a T cell receptor comprising TRBC2, identifying the subject as a candidate for treatment using a multifunctional molecule comprising an antigen binding domain that binds to TRBC2, and optionally not as a candidate for treatment using a multifunctional molecule comprising an antigen binding domain that binds to TRBC1.

[1068] In another aspect, the disclosure features a method of evaluating a subject in need of treatment for cancer, e.g., a lymphoma, comprising determining (e.g., directly determining or indirectly determining, e.g., obtaining information regarding) whether a subject has cancer cells that express a T cell receptor comprising TRBC1 or TRBC2.

### Exemplary Embodiment 5

[1069] 1. A multifunctional molecule, comprising:
   [1070] (i) a first antigen binding domain that preferentially binds to a tumor antigen on a lymphoma cell (e.g., T cell), wherein the tumor antigen is T cell receptor beta chain constant domain 1 (TRBC1) or T cell receptor beta chain constant domain 2 (TRBC2),
   [1071] and
   [1072] (ii) one, two, or all of:
      [1073] (a) an immune cell engager chosen from an NK cell engager (e.g., a molecule that binds to NKp30, NKp46, NKG2D, or CD16), a T cell engager, a B cell engager, a dendritic cell engager, or a macrophage cell engager;
      [1074] (b) a cytokine molecule or cytokine inhibitor molecule;
      [1075] (c) a death receptor signal engager; and
      [1076] (d) a stromal modifying moiety.
[1077] 1A. A multifunctional molecule, comprising:
   [1078] (i) a first antigen binding domain that selectively binds to T cell receptor beta chain constant domain 1 (TRBC1) or T cell receptor beta chain constant domain 2 (TRBC2), and
   [1079] (ii) one, two, or all of:
      [1080] (a) an immune cell engager chosen from an NK cell engager (e.g., a molecule that binds to NKp30, NKp46, NKG2D, or CD16), a T cell engager that binds to a T cell antigen other than CD3, a B cell engager, a dendritic cell engager, or a macrophage cell engager;
      [1081] (b) a cytokine molecule or cytokine inhibitor molecule;
      [1082] (c) a death receptor signal engager; and
      [1083] (d) a stromal modifying moiety.
[1084] 2. A multifunctional molecule, comprising:
   [1085] (i) a first antigen binding domain that selectively targets lymphocytes expressing T cell receptor beta chain constant domain 1 (TRBC1) or T cell receptor beta chain constant domain 2 (TRBC2),
   [1086] and
   [1087] (ii) one, two, or all of:
      [1088] (a) an immune cell engager chosen from an NK cell engager (e.g., a molecule that binds to NKp30, NKp46, NKG2D, or CD16), a T cell engager, a B cell engager, a dendritic cell engager, or a macrophage cell engager;
      [1089] (b) a cytokine molecule or cytokine inhibitor molecule;
      [1090] (c) a death receptor signal engager; and
      [1091] (d) a stromal modifying moiety.
[1092] 3. The multifunctional molecule of embodiment 1 or 2, wherein the multifunctional molecule:
   [1093] (i) binds specifically to an epitope of TRBC1 or TRBC2, e.g., the same or similar epitope as the epitope recognized by an anti-TRBC1 or anti-TRBC2 antibody molecule as described herein;
   [1094] (ii) shows the same or similar binding affinity or specificity, or both, as an anti-TRBC1 or anti-TRBC2 antibody molecule as described herein;
   [1095] (iii) inhibits, e.g., competitively inhibits, the binding of an anti-TRBC1 or anti-TRBC2 antibody molecule as described herein;
   [1096] (iv) binds the same or an overlapping epitope with an anti-TRBC1 or anti-TRBC2 antibody molecule as described herein; or
   [1097] (v) competes for binding, and/or binds the same epitope, with an anti-TRBC1 or anti-TRBC2 antibody molecule as described herein.
[1098] 4. The multifunctional molecule of embodiment 3, wherein the anti-TRBC1 or anti-TRBC2 antibody molecule comprises one or more CDRs, framework regions, variable domains, heavy or light chains, or an antigen binding domain chosen from Tables 2-5, or a sequence substantially identical thereto.
[1099] 5. The multifunctional molecule of any of embodiments 1-4, wherein the antigen or tumor antigen is TRBC1.
[1100] 6. The multifunctional molecule of any of embodiments 1-4, wherein the antigen or tumor antigen is TRBC2.
[1101] 7. The multifunctional molecule of any of embodiments 1-4 or 6, wherein the first antigen binding domain comprises an anti-TRBC2 antigen binding domain disclosed herein, e.g., comprises one or more CDRs, framework regions, variable regions, or antigen binding domains disclosed in any of Tables 21-25, or a sequence having at least 85%, 90%, 95%, or 99% identity thereto.
[1102] 8. The multifunctional molecule of any one of embodiments 1-4, 6, or 7, wherein the first antigen binding domain has a higher affinity for a T cell receptor comprising TRBC2 than for a T cell receptor not comprising TRBC2, optionally wherein the K_{D} for the binding between the first antigen binding domain and TRBC2 is no more than 40%, 30%, 20%, 10%, 1%, 0.1%, or 0.01% of the K_{D} for the binding between the first antigen binding domain and a T cell receptor not comprising TRBC2.
[1103] 9. The multifunctional molecule of any one of embodiments 1-4 or 6-8, wherein the first antigen binding domain has a higher affinity for a T cell receptor comprising TRBC2 than for a T cell receptor comprising TRBC1, optionally wherein the K_{D} for the binding between the first antigen binding domain and TRBC2 is no more than 40%, 30%, 20%, 10%, 1%, 0.1%, or 0.01% of the K_{D} for the binding between the first antigen binding domain and a T cell receptor comprising TRBC1.
[1104] 10. The multifunctional molecule of any preceding embodiment, wherein binding of the first antigen binding domain to TRBC1 or TRBC2 on a lymphoma cell or lymphocyte (e.g., T cell) or the tumor antigen on the lymphoma cell (e.g., T cell) does not activate the lymphoma cell or lymphocyte, e.g., T cell.
[1105] 11. The multifunctional molecule of any preceding embodiment, wherein binding of the first antigen binding domain to TRBC1 or TRBC2 on a lymphoma cell or lymphocyte (e.g., T cell) or the tumor antigen on the lymphoma cell e.g., T cell) does not appreciably activate the lymphoma cell or lymphocyte, e.g., T cell, (e.g., as measured by T cell proliferation, expression of a T cell activation marker (e.g., CD69 or CD25), and/or expression of a cytokine (e.g., TNFα and IFNγ).
[1106] 12. The multifunctional molecule of any one of embodiments 1 or 2-11, wherein the multifunctional molecule preferentially binds to a lymphoma cell over a non-lymphoma cell, optionally wherein the binding between the multifunctional molecule and the lymphoma cell is more than 10, 20, 30, 40, or 50-fold greater than the binding between the multifunctional molecule and a non-lymphoma cell.
[1107] 13. The multifunctional molecule of any one of embodiments 2-9, wherein:
   [1108] (i) the binding between the multifunctional molecule and the lymphocyte expressing TRBC1 is more than 10, 20, 30, 40, or 50-fold greater than the binding between the multifunctional molecule and a lymphocyte that does not express TRBC1, or
   [1109] (ii) the binding between the multifunctional molecule and the lymphocyte expressing TRBC2 is more than 10, 20, 30, 40, or 50-fold greater than the binding between the multifunctional molecule and a lymphocyte that does not express TRBC2.
[1110] 14. The multifunctional molecule of any one of embodiments 1-13, wherein the multifunctional molecule comprises an immune cell engager chosen from an NK cell engager, a T cell engager, a B cell engager, a dendritic cell engager, or a macrophage cell engager.
[1111] 15. The multifunctional molecule of embodiment 14, wherein the immune cell engager binds to and activates an immune cell, e.g., an effector cell.
[1112] 16. The multifunctional molecule of embodiment 15, wherein the immune cell engager binds to, but does not activate, an immune cell, e.g., an effector cell.
[1113] 17. The multifunctional molecule of any one of embodiments 14-16, wherein the immune cell engager is a T cell engager, e.g., a T cell engager that mediates binding to and activation of a T cell, or a T cell engager that mediates binding to but not activation of a T cell.
[1114] 18. The multifunctional molecule of embodiment 17, wherein the T cell engager binds to TCRα, TCRβ, TCRγ, TCR ζ, ICOS, CD28, CD27, HVEM, LIGHT, CD40, 4-1BB, OX40, DR3, GITR, CD30, TIM1, SLAM, CD2, or CD226, e.g., the T cell engager is an anti-TCRβ antibody molecule.
[1115] 19. The multifunctional molecule of any one of embodiments 14-16, wherein the immune cell engager is an NK cell engager, e.g., an NK cell engager that mediates binding to and activation of an NK cell, or an NK cell engager that mediates binding to but not activation of an NK cell.
[1116] 20. The multifunctional molecule of embodiment 19, wherein the NK cell engager is chosen from an antibody molecule, e.g., an antigen binding domain, or ligand that binds to (e.g., activates): NKp30, NKp40, NKp44, NKp46, NKG2D, DNAM1, DAP10, CD16 (e.g., CD16a, CD16b, or both), CRTAM, CD27, PSGL1, CD96, CD100 (SEMA4D), NKp80, CD244 (also known as SLAMF4 or 2B4), SLAMF6, SLAMF7, KIR2DS2, KIR2DS4, KIR3DS1, KIR2DS3, KIR2DS5, KIR2DS1, CD94, NKG2C, NKG2E, or CD160, e.g., the NK cell engager is an antibody molecule or ligand that binds to (e.g., activates) NKp30.
[1117] 21. The multifunctional molecule of embodiment 19, wherein the NK cell engager is an antibody molecule, e.g., an antigen binding domain.
[1118] 22. The multifunctional molecule of either of embodiments 20 or 21, wherein the NK cell engager is capable of engaging an NK cell.
[1119] 23. The multifunctional molecule of any one of embodiments 19-22, wherein the NK cell engager is an antibody molecule, e.g., an antigen binding domain, that binds to NKp30, NKp46, NKG2D, or CD16.
[1120] 24. The multifunctional molecule of any preceding embodiment, wherein the multifunctional molecule:
   [1121] (i) binds specifically to an epitope of NKp30, NKp46, NKG2D, or CD16, e.g., the same or similar epitope as the epitope recognized by an anti-NKp30, anti-NKp46, anti-NKG2D, or anti-CD16 antibody molecule as described herein;
   [1122] (ii) shows the same or similar binding affinity or specificity, or both, as an anti-NKp30, anti-NKp46, anti-NKG2D, or anti-CD16 antibody molecule as described herein;
   [1123] (iii) inhibits, e.g., competitively inhibits, the binding of an anti-NKp30, anti-NKp46, anti-NKG2D, or anti-CD16 antibody molecule as described herein;
   [1124] (iv) binds the same or an overlapping epitope with an anti-NKp30, anti-NKp46, anti-NKG2D, or anti-CD16 antibody molecule as described herein; or
   [1125] (v) competes for binding, and/or binds the same epitope, with an anti-NKp30, anti-NKp46, anti-NKG2D, or anti-CD16 molecule as described herein.
[1126] 25. The multifunctional molecule of any of embodiments 19-24, wherein the anti-NKp30, anti-NKp46, anti-NKG2D, or anti-CD16 antibody molecule comprises one or more CDRs, framework regions, variable domains, heavy or light chains, or an antigen binding domain chosen from Tables 7, 8, 8A, 8B, 9, 10 or 15, or a sequence substantially identical thereto.
[1127] 26. The multifunctional molecule of any of embodiments 19-25, wherein the NK cell engager is an antibody molecule, e.g., an antigen binding domain, that binds to NKp30.
[1128] 27. The multifunctional molecule of any of embodiments 19-26, wherein lysis of the lymphoma cell or lymphocyte is mediated by NKp30.
[1129] 28. The multifunctional molecule of any of embodiments 19-27, wherein the multifunctional molecule does not activate the NK cell when incubated with the NK cell in the absence of the tumor antigen on the lymphoma cell or TRBC1 or TRBC2 on the lymphocyte.
[1130] 29. The multifunctional molecule of any of embodiments 19-28, wherein the multifunctional molecule activates the NK cell when the NK cell is a NKp30 expressing NK cell and either: (1) the tumor antigen on the lymphoma cell is also present or (2) TRBC1 or TRBC2 on the lymphocyte is also present.
[1131] 30. The multifunctional molecule of any of embodiments 19-29, wherein the multifunctional molecule does not activate the NK cell when the NK cell is not a NKp30 expressing NK cell and either: (1) the tumor antigen on the lymphoma cell is also present or (2) TRBC1 or TRBC2 on the lymphocyte is also present.
[1132] 31. The multifunctional molecule of any of embodiments 19-30, wherein the NK cell engager comprises an anti-NKp30 antigen binding domain disclosed herein, e.g., comprises one or more CDRs, framework regions, variable regions, or antigen binding domains disclosed in any of Tables 7, 8, 8A, 8B, 9, 10, 18, and 25, or a sequence having at least 85%, 90%, 95%, or 99% identity thereto.
[1133] 32. The multifunctional molecule of any of embodiments 19-25, wherein the NK cell engager is an antibody molecule, e.g., an antigen binding domain, that binds to NKp46.
[1134] 33. The multifunctional molecule of embodiment 32, wherein lysis of the lymphoma cell is mediated by NKp46.
[1135] 34. The multifunctional molecule of either of embodiments 32 or 33, wherein the multifunctional molecule does not activate the NK cell when incubated with the NK cell in the absence of the tumor antigen on the lymphoma cell.
[1136] 35. The multifunctional molecule of any one of embodiments 32-34, wherein the multifunctional molecule activates the NK cell when the NK cell is a NKp46 expressing NK cell and the tumor antigen on the lymphoma cell is also present.
[1137] 36. The multifunctional molecule of any one of embodiments 32-35, wherein the multifunctional molecule does not activate the NK cell when the NK cell is not a NKp46 expressing NK cell and the tumor antigen on the lymphoma cell is also present.
[1138] 37. The multifunctional molecule of any one of embodiments 32-36, wherein the NK cell engager comprises a VH comprising the amino acid sequence of SEQ ID NO: 6182 (or an amino acid sequence having at least about 75%, 80%, 85%, 90%, 95%, or 99% sequence identity to SEQ ID NO: 6182).
[1139] 38. The multifunctional molecule of any one of embodiments 32-37, wherein the NK cell engager comprises a VL comprising the amino acid sequence of SEQ ID NO: 6183 (or an amino acid sequence having at least about 93%, 95%, or 99% sequence identity to SEQ ID NO: 6183).
[1140] 39. The multifunctional molecule of 32-38, wherein the NK cell engager comprises an scFv comprising the amino acid sequence of SEQ ID NO: 6181 (or an amino acid sequence having at least about 93%, 95%, or 99% sequence identity to SEQ ID NO: 6181).
[1141] 40. The multifunctional molecule of any of embodiments 19-25, wherein the NK cell engager is an antibody molecule, e.g., an antigen binding domain, that binds to NKG2D.
[1142] 41. The multifunctional molecule of embodiment 40, wherein lysis of the lymphoma cell is mediated by NKG2D.
[1143] 42. The multifunctional molecule of either of embodiments 40 or 41, wherein the multifunctional molecule does not activate the NK cell when incubated with the NK cell in the absence of the tumor antigen on the lymphoma cell.
[1144] 43. The multifunctional molecule of any one of embodiments 40-42, wherein the multifunctional molecule activates the NK cell when the NK cell is a NKG2D expressing NK cell and the tumor antigen on the lymphoma cell is also present.
[1145] 44. The multifunctional molecule of any one of embodiments 40-43, wherein the multifunctional molecule does not activate the NK cell when the NK cell is not a NKG2D expressing NK cell and the tumor antigen on the lymphoma cell is also present.
[1146] 45. The multifunctional molecule of any one of embodiments 40-44, wherein the NK cell engager comprises a VH comprising the amino acid sequence of SEQ ID NO: 6176 (or an amino acid sequence having at least about 75%, 80%, 85%, 90%, 95%, or 99% sequence identity to SEQ ID NO: 6176).
[1147] 46. The multifunctional molecule of any one of embodiments 40-45, wherein the NK cell engager comprises a VL comprising the amino acid sequence of SEQ ID NO: 6177 (or an amino acid sequence having at least about 93%, 95%, or 99% sequence identity to SEQ ID NO: 6177).
[1148] 47. The multifunctional molecule of any of embodiments 40-46, wherein the NK cell engager comprises an scFv comprising the amino acid sequence of SEQ ID NO: 6175 (or an amino acid sequence having at least about 93%, 95%, or 99% sequence identity to SEQ ID NO: 6175).
[1149] 48. The multifunctional molecule of any one of embodiments 40-44, wherein the NK cell engager comprises a VH comprising the amino acid sequence of SEQ ID NO: 6179 (or an amino acid sequence having at least about 75%, 80%, 85%, 90%, 95%, or 99% sequence identity to SEQ ID NO: 6179).
[1150] 49. The multifunctional molecule of any one of embodiments 40-44 or 48, wherein the NK cell engager comprises a VL comprising the amino acid sequence of SEQ ID NO: 6180 (or an amino acid sequence having at least about 93%, 95%, or 99% sequence identity to SEQ ID NO: 6180).
[1151] 50. The multifunctional molecule of any of embodiments 40-44, 48, or 49, wherein the NK cell engager comprises an scFv comprising the amino acid sequence of SEQ ID NO: 6178 (or an amino acid sequence having at least about 93%, 95%, or 99% sequence identity to SEQ ID NO: 6178).
[1152] 51. The multifunctional molecule of any of embodiments 19-25, wherein the NK cell engager is an antibody molecule, e.g., an antigen binding domain, that binds to CD16.
[1153] 52. The multifunctional molecule of embodiment 51, wherein lysis of the lymphoma cell is mediated by CD16.
[1154] 53. The multifunctional molecule of either of embodiments 51 or 52, wherein the multifunctional molecule does not activate the NK cell when incubated with the NK cell in the absence of the tumor antigen on the lymphoma cell.
[1155] 54. The multifunctional molecule of any one of embodiments 51-53, wherein the multifunctional molecule activates the NK cell when the NK cell is a CD16 expressing NK cell and the tumor antigen on the lymphoma cell is also present.
[1156] 55. The multifunctional molecule of any one of embodiments 51-54, wherein the multifunctional molecule does not activate the NK cell when the NK cell is not a CD16 expressing NK cell and the tumor antigen on the lymphoma cell is also present.
[1157] 56. The multifunctional molecule of any one of embodiments 51-55, wherein the NK cell engager comprises a VH comprising the amino acid sequence of SEQ ID NO: 6185 (or an amino acid sequence having at least about 75%, 80%, 85%, 90%, 95%, or 99% sequence identity to SEQ ID NO: 6185).
[1158] 57. The multifunctional molecule of any one of embodiments 51-56, wherein the NK cell engager comprises a VL comprising the amino acid sequence of SEQ ID NO: 6186 (or an amino acid sequence having at least about 93%, 95%, or 99% sequence identity to SEQ ID NO: 6186).
[1159] 58. The multifunctional molecule of any of embodiments 51-57, wherein the NK cell engager comprises an scFv comprising the amino acid sequence of SEQ ID NO: 6184 (or an amino acid sequence having at least about 93%, 95%, or 99% sequence identity to SEQ ID NO: 6184).
[1160] 59. The multifunctional molecule of embodiment 19, wherein the NK cell engager is a ligand, optionally, the ligand further comprises an immunoglobulin constant region, e.g., an Fc region.
[1161] 60. The multifunctional molecule of embodiment 59, wherein the NK cell engager is a ligand of NKp44 or NKp46, e.g., a viral HA.
[1162] 61. The multifunctional molecule of embodiment 59, wherein the NK cell engager is a ligand of DAP10, e.g., a coreceptor for NKG2D.
[1163] 62. The multifunctional molecule of embodiment 59, wherein the NK cell engager is a ligand of CD16, e.g., a CD16a/b ligand, e.g., a CD16a/b ligand further comprising an antibody Fc region.
[1164] 63. The multifunctional molecule of any one of embodiments 14-16, wherein the immune cell engager mediates binding to, or activation of, or both of, one or more of a B cell, a macrophage, and/or a dendritic cell.
[1165] 64. The multifunctional molecule of embodiment 63, wherein the immune cell engager comprises a B cell, macrophage, and/or dendritic cell engager chosen from one or more of CD40 ligand (CD40L) or a CD70 ligand; an antibody molecule that binds to CD40 or CD70; an antibody molecule to OX40; an OX40 ligand (OX40L); an agonist of a Toll-like receptor (e.g., a TLR4, e.g., a constitutively active TLR4 (caTLR4) or a TLR9 agonist); a 41BB; a CD2 agonist; a CD47; or a STING agonist, or a combination thereof.
[1166] 65. The multifunctional molecule of any one of embodiments 14-16, wherein the immune cell engager is a B cell engager, e.g., a CD40L, an OX40L, or a CD70 ligand, or an antibody molecule that binds to OX40, CD40 or CD70.
[1167] 66. The multifunctional molecule of any one of embodiments 14-16, wherein the immune cell engager is a macrophage cell engager, e.g., a CD2 agonist; a CD40L; an OX40L; an antibody molecule that binds to OX40, CD40 or CD70; an agonist of a Toll-like receptor (TLR) (e.g., a TLR4, e.g., a constitutively active TLR4 (caTLR4) or a TLR9 agonist); CD47; or a STING agonist.
[1168] 67. The multifunctional molecule of any one of embodiments 14-16, wherein the immune cell engager is a dendritic cell engager, e.g., a CD2 agonist, an OX40 antibody, an OX40L, 41BB agonist, a Toll-like receptor agonist or a fragment thereof (e.g., a TLR4, e.g., a constitutively active TLR4 (caTLR4)), CD47 agonist, or a STING agonist.
[1169] 68. The multifunctional molecule of embodiment 66 or 67, wherein the STING agonist comprises a cyclic dinucleotide, e.g., a cyclic di-GMP (cdGMP), a cyclic di-AMP (cdAMP), or a combination thereof, optionally with 2′,5′ or 3′,5′ phosphate linkages, e.g., wherein the STING agonist is covalently coupled to the multifunctional molecule.
[1170] 69. The multifunctional molecule of any one of embodiments 1-13, wherein the multifunctional molecule comprises a cytokine molecule.
[1171] 70. The multifunctional molecule of embodiment 69, wherein the cytokine molecule is chosen from interleukin-2 (IL-2), interleukin-7 (IL-7), interleukin-12 (IL-12), interleukin-15 (IL-15), interleukin-18 (IL-18), interleukin-21 (IL-21), or interferon gamma, or a fragment or variant thereof, or a combination of any of the aforesaid cytokines.
[1172] 71. The multifunctional molecule of embodiment 70, wherein the cytokine molecule is interleukin-2 (IL-2).
[1173] 72. The multifunctional molecule of any of embodiments 69-71, wherein the cytokine molecule is a monomer or a dimer.
[1174] 73. The multifunctional molecule of any one of embodiments 69-72, wherein the cytokine molecule further comprises a receptor dimerizing domain, e.g., an IL15Ralpha dimerizing domain.
[1175] 74. The multifunctional molecule of embodiment 73, wherein the cytokine molecule (e.g., IL-15) and the receptor dimerizing domain (e.g., an IL15Ralpha dimerizing domain) are not covalently linked, e.g., are non-covalently associated.
[1176] 75. The multifunctional molecule of any of embodiments 1-13, wherein the multifunctional molecule comprises a cytokine inhibitor molecule.
[1177] 76. The multifunctional molecule of embodiment 75, wherein the cytokine inhibitor molecule is a TGF-beta inhibitor.
[1178] 77. The multifunctional molecule of either of embodiments 75 or 76, wherein the TGF-beta inhibitor inhibits (e.g., reduces the activity of): (i) TGF-beta 1; (ii) TGF-beta 2; (iii) TGF-beta 3; (iv) (i) and (ii); (v) (i) and (iii); (vi) (ii) and (iii); or (vii) (i), (ii), and (iii).
[1179] 78. The multifunctional molecule of any of embodiments 75-77, wherein the TGF-beta inhibitor comprises a portion of a TGF-beta receptor (e.g., an extracellular domain of a TGF-beta receptor) that is capable of inhibiting (e.g., reducing the activity of) TGF-beta, or functional fragment or variant thereof.
[1180] 79. The multifunctional molecule of embodiment 78, wherein the TGF-beta inhibitor comprises a portion of (i) TGFBR1; (ii) TGFBR2; (iii) TGFBR3; (iv) (i) and (ii); (v) (i) and (iii); (vi) (ii) and (iii); or (vii) (i), (ii), and (iii).
[1181] 80. The multifunctional molecule of any of embodiments 75-79, wherein the TGF-beta inhibitor comprises an amino acid sequence selected from Table 16, or an amino acid sequence having at least about 93%, 95%, or 99% sequence identity thereto.
[1182] 81. The multifunctional molecule of any of embodiments 1-13, wherein the multifunctional molecule comprises a death receptor signal engager chosen from a TNF-related apoptosis-inducing ligand (TRAIL) molecule, a death receptor molecule, or an antigen binding domain that specifically binds to a death receptor.
[1183] 82. The multifunctional molecule of embodiment 81, wherein the death receptor signal engager activates death receptor signaling in the lymphoma cell (e.g., T cell) or lymphocyte expressing TRBC1 or TRBC2, e.g., and induces apoptosis or cell death in said cell.
[1184] 83. The multifunctional molecule of either of embodiments 81 or 82, wherein the death receptor signal engager does not activate death receptor signaling on non-lymphoma cells and lymphocytes not expressing TRBC1 or not expressing TRBC2.
[1185] 84. The multifunctional molecule of any of embodiments 81-83, wherein the death receptor signal engager comprises a TRAIL molecule, e.g., one or more TRAIL polypeptides or a fragment thereof.
[1186] 85. The multifunctional molecule of embodiment 84, wherein the TRAIL molecule specifically binds to Death Receptor 4 (DR4) or Death Receptor 5 (DR5).
[1187] 86. The multifunctional molecule of either of embodiments 84 or 85, wherein the TRAIL molecule comprises a truncated TRAIL polypeptide, e.g., relative to a wild-type TRAIL polypeptide.
[1188] 87. The multifunctional molecule of embodiment 86, wherein the TRAIL molecule comprises at least residues corresponding to amino acids 95-281 of human TRAIL, e.g., a truncated TRAIL molecule comprising residues corresponding to amino acids 95-281 of human TRAIL.
[1189] 88. The multifunctional molecule of embodiment 87, wherein the TRAIL molecule comprises a truncated TRAIL polypeptide comprising amino acids 95-281 of human TRAIL, e.g., and not amino acids 1-94 of human TRAIL.
[1190] 89. The multifunctional molecule of embodiment 86, wherein the TRAIL molecule comprises at least residues corresponding to amino acids 122-281 of human TRAIL, e.g., a truncated TRAIL molecule comprising residues corresponding to amino acids 122-281 of human TRAIL.
[1191] 90. The multifunctional molecule of embodiment 89, wherein the TRAIL molecule comprises a truncated TRAIL polypeptide comprising amino acids 122-281 of human TRAIL, e.g., and not amino acids 1-121 of human TRAIL.
[1192] 91. The multifunctional molecule of any of embodiments 84-90, wherein the death receptor signal engager comprises one, two, or three TRAIL molecules.
[1193] 92. The multifunctional molecule of any of embodiments 81-83, wherein the death receptor signal engager comprises an antigen binding domain that specifically binds to a death receptor, e.g., Death Receptor 4 (DR4) or Death Receptor 5 (DR5).
[1194] 93. The multifunctional molecule of embodiment 92, wherein the death receptor signal engager comprises one, two, or three antigen binding domains that specifically binds to a death receptor.
[1195] 94. The multifunctional molecule of either of embodiments 92 or 93, wherein the antigen binding domain that specifically binds to a death receptor binds to DR5.
[1196] 95. The multifunctional molecule of any of embodiments 92-94, wherein the antigen binding domain that specifically binds to a death receptor comprises tigatuzumab, drozitumab, or conatumumab.
[1197] 96. The multifunctional molecule of any of embodiments 81-95, wherein the death receptor signal engager comprises an amino acid sequence selected from Table 11, or an amino acid sequence having at least about 75%, 80%, 85%, 90%, 95%, or 99% sequence identity thereto.
[1198] 97. The multifunctional molecule of any of embodiments 81-96, wherein the death receptor signal engager comprises an amino acid sequence of SEQ ID NO: 6157, or an amino acid sequence having at least about 75%, 80%, 85%, 90%, 95%, or 99% sequence identity thereto.
[1199] 98. The multifunctional molecule of any of embodiments 81-96, wherein the death receptor signal engager comprises an amino acid sequence of SEQ ID NO: 6158, or an amino acid sequence having at least about 75%, 80%, 85%, 90%, 95%, or 99% sequence identity thereto.
[1200] 99. The multifunctional molecule of any of embodiments 81-96, wherein the death receptor signal engager comprises an amino acid sequence of SEQ ID NO: 6159, or an amino acid sequence having at least about 75%, 80%, 85%, 90%, 95%, or 99% sequence identity thereto.
[1201] 100. The multifunctional molecule of any of embodiments 81-96, wherein the death receptor signal engager comprises an amino acid sequence of SEQ ID NO: 6160, or an amino acid sequence having at least about 75%, 80%, 85%, 90%, 95%, or 99% sequence identity thereto.
[1202] 101. The multifunctional molecule of any of embodiments 81-96, wherein the death receptor signal engager comprises an amino acid sequence of SEQ ID NO: 6161, or an amino acid sequence having at least about 75%, 80%, 85%, 90%, 95%, or 99% sequence identity thereto.
[1203] 102. The multifunctional molecule of any of embodiments 81-96, wherein the death receptor signal engager comprises an amino acid sequence of SEQ ID NO: 6162, or an amino acid sequence having at least about 75%, 80%, 85%, 90%, 95%, or 99% sequence identity thereto.
[1204] 103. The multifunctional molecule of any of embodiments 81-96, wherein the death receptor signal engager comprises an amino acid sequence of SEQ ID NO: 6163, or an amino acid sequence having at least about 75%, 80%, 85%, 90%, 95%, or 99% sequence identity thereto.
[1205] 104. The multifunctional molecule of any of embodiments 81-96, wherein the death receptor signal engager comprises an amino acid sequence of SEQ ID NO: 6164, or an amino acid sequence having at least about 75%, 80%, 85%, 90%, 95%, or 99% sequence identity thereto.
[1206] 105. The multifunctional molecule of any of embodiments 81-96, wherein the death receptor signal engager comprises an amino acid sequence of SEQ ID NO: 6165, or an amino acid sequence having at least about 75%, 80%, 85%, 90%, 95%, or 99% sequence identity thereto.
[1207] 106. The multifunctional molecule of embodiment 18, wherein the T cell engager binds to TCRβ, e.g., to TCR beta V chain (TCRBV).
[1208] 107. The multifunctional molecule of embodiment 106, wherein the T cell engager comprises an antigen binding domain (e.g., an antibody molecule or fragment thereof) that binds to (e.g., and in some embodiments activates) TCRs.
[1209] 108. The multifunctional molecule of either of embodiments 106 or 107, wherein the T cell engager comprises an anti-TCRβV antibody molecule, e.g., that specifically binds to a human TCR beta V chain (TCRβV).
[1210] 109. The multifunctional molecule of any of embodiments 106-108, wherein the T cell engager does not bind to the lymphoma cell or the lymphocyte expressing TRBC1 or TRBC2.
[1211] 110. The multifunctional molecule of any of embodiments 106-108, wherein the T cell engager is capable of binding to or binds to the lymphoma cell or the lymphocyte expressing TRBC1 or TRBC2.
[1212] 111. The multifunctional molecule of any of embodiments 106-110, wherein the T cell engager does not activate the lymphoma cell or the lymphocyte expressing TRBC1 or TRBC2.
[1213] 112. The multifunctional molecule of any of embodiments 106-111, wherein the T cell engager comprises an anti-TCRβV antibody molecule that specifically binds to a TCRβV subfamily or subfamily member of Table 12.
[1214] 113. The multifunctional molecule of embodiment 112, wherein the anti-TCRβV antibody molecule specifically binds to TCRβ V6, e.g., a TCRβ V6 subfamily comprising: TCRβ V6-4*01, TCRβ V6-4*02, TCRβ V6-9*01, TCRβ V6-8*01, TCRβ V6-5*01, TCRβ V6-6*02, TCRβ V6-6*01, TCRβ V6-2*01, TCRβ V6-3*01 or TCRβ V6-1*01.
[1215] 114. The multifunctional molecule of embodiment 113, wherein the anti-TCRβV antibody molecule comprises one or more CDRs, framework regions, or variable heavy and/or light chain regions provided in Table 13 or having at least about 93%, 95%, or 99% sequence identity thereto.
[1216] 115. The multifunctional molecule of embodiment 112, wherein the anti-TCRβV antibody molecule specifically binds to TCRβ V12, e.g., a TCRβ V12 subfamily comprising: TCRβ V12-4*01, TCRβ V12-3*01 or TCRβ V12-5*01.
[1217] 116. The multifunctional molecule of embodiment 115, wherein the anti-TCRβV antibody molecule comprises one or more CDRs, framework regions, or variable heavy and/or light chain regions provided in Table 14 or having at least about 93%, 95%, or 99% sequence identity thereto.
[1218] 117. The multifunctional molecule of any one of embodiments 1-13, wherein the multifunctional molecule comprises a stromal modifying moiety.
[1219] 118. The multifunctional molecule of embodiment 117, wherein the stromal modifying moiety causes one or more of: decreases the level or production of a stromal or extracellular matrix (ECM) component; decreases tumor fibrosis; increases interstitial tumor transport; improves tumor perfusion; expands the tumor microvasculature; decreases interstitial fluid pressure (IFP) in a tumor; or decreases or enhances penetration or diffusion of an agent, e.g., a cancer therapeutic or a cellular therapy, into a tumor or tumor vasculature.
[1220] 119. The multifunctional molecule of embodiment 118, wherein the stromal or ECM component decreased is chosen from a glycosaminoglycan or an extracellular protein, or a combination thereof.
[1221] 120. The multifunctional molecule of any one of embodiments 1-119, wherein the multifunctional molecule comprises:
   [1222] (i) an immune cell engager (e.g., a T cell engager, an NK cell engager, a B cell engager, a dendritic cell engager, or a macrophage cell engager) and a cytokine molecule,
   [1223] (ii) an immune cell engager (e.g., a T cell engager, an NK cell engager, a B cell engager, a dendritic cell engager, or a macrophage cell engager) and a cytokine inhibitor molecule,
   [1224] (iii) an immune cell engager (e.g., a T cell engager, an NK cell engager, a B cell engager, a dendritic cell engager, or a macrophage cell engager) and a death receptor signal engager,
   [1225] (iv) an immune cell engager (e.g., a T cell engager, an NK cell engager, a B cell engager, a dendritic cell engager, or a macrophage cell engager) and a stromal modifying moiety,
   [1226] (v) a cytokine molecule and a stromal modifying moiety,
   [1227] (vi) a cytokine molecule and a death receptor signal engager,
   [1228] (vii) a cytokine inhibitor molecule and a stromal modifying moiety,
   [1229] (viii) a cytokine inhibitor molecule and a death receptor signal engager,
   [1230] (ix) an immune cell engager (e.g., a T cell engager, an NK cell engager, a B cell engager, a dendritic cell engager, or a macrophage cell engager), a cytokine molecule, a death receptor signal engager, and a stromal modifying moiety, or
   [1231] (x) an immune cell engager (e.g., a T cell engager, an NK cell engager, a B cell engager, a dendritic cell engager, or a macrophage cell engager), a cytokine inhibitor molecule, a death receptor signal engager, and a stromal modifying moiety.
[1232] 121. The multifunctional molecule of any one of embodiments 1-120, wherein the multifunctional molecule comprises the following configuration:

A,B-[dimerization module]-C,-D, wherein:
[1233] (a) the dimerization module comprises an immunoglobulin constant domain, e.g., a heavy chain constant domain (e.g., a homodimeric or heterodimeric heavy chain constant region, e.g., an Fc region), or a constant domain of an immunoglobulin variable region (e.g., a Fab region); and
[1234] (b) A, B, C, and D are independently absent; (i) an antigen binding domain that preferentially binds to TRBC1 or TRBC2; (ii) an immune cell engager chosen from a T cell engager, an NK cell engager, a B cell engager, a dendritic cell engager, or a macrophage cell engager; (iii) a cytokine molecule or cytokine inhibitor molecule; (iv) a death receptor signal engager; or (v) a stromal modifying moiety, provided that:
[1235] at least one, two, or three of A, B, C, and D comprises an antigen binding domain that preferentially binds to TRBC1 or TRBC2, and
[1236] any of the remaining A, B, C, and D is absent or comprises one of an immune cell engager, a cytokine molecule, a cytokine inhibitor molecule, a death receptor signal engager, or a stromal modifying moiety.
[1237] 122. The multifunctional molecule of embodiment 121, wherein:
   [1238] (1) A comprises an antigen binding domain that preferentially binds to a T cell receptor comprising TRBC1 or TRBC2, and B, C, or D comprises an immune cell engager, e.g., a T cell engager, e.g., an anti-TCRβV antibody molecule;
   [1239] (2) A comprises an antigen binding domain that preferentially binds to TRBC1 or TRBC2, and B, C, or D comprises an immune cell engager, e.g., an NK cell engager, e.g., an anti-NKp30 or anti-NKp46 antibody molecule;
   [1240] (3) A comprises an antigen binding domain that preferentially binds to TRBC1 or TRBC2, and B, C, or D comprises a cytokine molecule;
   [1241] (4) A comprises an antigen binding domain that preferentially binds to TRBC1 or TRBC2, and B, C, or D comprises a cytokine inhibitor molecule;
   [1242] (5) A comprises an antigen binding domain that preferentially binds to TRBC1 or TRBC2, and B, C, or D comprises a death receptor signal engager;
   [1243] (6) A comprises an antigen binding domain that preferentially binds to TRBC1 or TRBC2, and B, C, or D comprises a stromal modifying moiety;
   [1244] (7) A comprises a first antigen binding domain that binds to a TRBC1 or TRBC2, B comprises a second antigen binding domain that preferentially binds to TRBC1 or TRBC2, and C or D comprises an immune cell engager, e.g., a T cell engager, e.g., an anti-TCRβV antibody molecule;
   [1245] (8) A comprises a first antigen binding domain that binds to TRBC1 or TRBC2, B comprises a second antigen binding domain that preferentially binds to TRBC1 or TRBC2, and C or D comprises an immune cell engager, e.g., an NK cell engager, e.g., an anti-NKp30, anti-NKp46, anti-NKG2D, or anti-CD16 antibody molecule;
   [1246] (9) A comprises a first antigen binding domain that preferentially binds to TRBC1 or TRBC2, B comprises a second antigen binding domain that preferentially binds to TRBC1 or TRBC2, and C or D comprises a cytokine molecule;
   [1247] (10) A comprises a first antigen binding domain that preferentially binds to TRBC1 or TRBC2, B comprises a second antigen binding domain that preferentially binds to TRBC1 or TRBC2, and C or D comprises a cytokine inhibitor molecule;
   [1248] (11) A comprises a first antigen binding domain that preferentially binds to TRBC1 or TRBC2, B comprises a second antigen binding domain that preferentially binds to TRBC1 or TRBC2, and C or D comprises a death receptor signal engager;
   [1249] (12) A comprises a first antigen binding domain that preferentially binds to TRBC1 or TRBC2, B comprises a second antigen binding domain that preferentially binds to TRBC1 or TRBC2, and C or D comprises a stromal modifying moiety;
   [1250] (13) A comprises a first antigen binding domain that preferentially binds to TRBC1 or TRBC2, C comprises a second antigen binding domain that preferentially binds to TRBC1 or TRBC2, and B or D comprises an immune cell engager, e.g., a T cell engager, e.g., an anti-TCRβV antibody molecule;
   [1251] (14) A comprises a first antigen binding domain that preferentially binds to TRBC1 or TRBC2, C comprises a second antigen binding domain that preferentially binds to TRBC1 or TRBC2, and B or D comprises an immune cell engager, e.g., an NK cell engager, e.g., an anti-NKp30, anti-NKp46, anti-NKG2D, or anti-CD16 antibody molecule;
   [1252] (15) A comprises a first antigen binding domain that preferentially binds to TRBC1 or TRBC2, C comprises a second antigen binding domain that preferentially binds to TRBC1 or TRBC2, and B or D comprises a cytokine molecule;
   [1253] (16) A comprises a first antigen binding domain that preferentially binds to TRBC1 or TRBC2, C comprises a second antigen binding domain that preferentially binds to TRBC1 or TRBC2, and B or D comprises a cytokine inhibitor molecule;
   [1254] (17) A comprises a first antigen binding domain that preferentially binds to TRBC1 or TRBC2, C comprises a second antigen binding domain that preferentially binds to TRBC1 or TRBC2, and B or D comprises a death receptor signal engager;
   [1255] (18) A comprises a first antigen binding domain that preferentially binds to TRBC1 or TRBC2, C comprises a second antigen binding domain that preferentially binds to TRBC1 or TRBC2, and B or D comprises a stromal modifying moiety;
   [1256] (19) A comprises a first antigen binding domain that preferentially binds to TRBC1 or TRBC2, and B, C, or D comprises (a) an immune cell engager, e.g., an NK cell engager, e.g., an anti-NKp30, anti-NKp46, anti-NKG2D, or anti-CD16 antibody molecule, and (b) a cytokine molecule;
   [1257] (20) A comprises a first antigen binding domain that preferentially binds to TRBC1 or TRBC2, and B, C, or D comprises (a) an immune cell engager, e.g., an NK cell engager, e.g., an anti-NKp30, anti-NKp46, anti-NKG2D, or anti-CD16 antibody molecule, and (b) a cytokine inhibitor molecule;
   [1258] (21) A comprises a first antigen binding domain that preferentially binds to TRBC1 or TRBC2, and B, C, or D comprises (a) an immune cell engager, e.g., an NK cell engager, e.g., an anti-NKp30, anti-NKp46, anti-NKG2D, or anti-CD16 antibody molecule, and (b) a death receptor signal engager;
   [1259] (22) A comprises a first antigen binding domain that preferentially binds to TRBC1 or TRBC2, and B, C, or D comprises (a) an immune cell engager, e.g., an NK cell engager, e.g., an anti-NKp30, anti-NKp46, anti-NKG2D, or anti-CD16 antibody molecule, and (b) a stromal modifying moiety;
   [1260] (23) A comprises a first antigen binding domain that preferentially binds to TRBC1 or TRBC2, and B, C, or D comprises (a) an immune cell engager, e.g., a T cell engager, e.g., an anti-TCRβV antibody molecule, and (b) a cytokine molecule;
   [1261] (24) A comprises a first antigen binding domain that preferentially binds to TRBC1 or TRBC2, and B, C, or D comprises (a) an immune cell engager, e.g., a T cell engager, e.g., an anti-TCRβV antibody molecule, and (b) a cytokine inhibitor molecule;
   [1262] (25) A comprises a first antigen binding domain that preferentially binds to TRBC1 or TRBC2, and B, C, or D comprises (a) an immune cell engager, e.g., a T cell engager, e.g., an anti-TCRβV antibody molecule, and (b) a death receptor signal engager;
   [1263] (26) A comprises a first antigen binding domain that preferentially binds to TRBC1 or TRBC2, and B, C, or D comprises (a) an immune cell engager, e.g., a T cell engager, e.g., an anti-TCRβV antibody molecule, and (b) a stromal modifying moiety;
   [1264] (27) A comprises a first antigen binding domain that preferentially binds to TRBC1 or TRBC2, and B, C, or D comprises (a) a cytokine molecule and (b) a stromal modifying moiety;
   [1265] (28) A comprises a first antigen binding domain that preferentially binds to TRBC1 or TRBC2, and B, C, or D comprises (a) a cytokine molecule and (b) a death receptor signal engager;
   [1266] (29) A comprises a first antigen binding domain that preferentially binds to TRBC1 or TRBC2, and B, C, or D comprises (a) a cytokine inhibitor molecule and (b) a stromal modifying moiety;
   [1267] (30) A comprises a first antigen binding domain that preferentially binds to TRBC1 or TRBC2, and B, C, or D comprises (a) a cytokine inhibitor molecule and (b) a death receptor signal engager;
   [1268] (31) A comprises a first antigen binding domain that preferentially binds to TRBC1 or TRBC2, and B, C, or D comprises (a) a death receptor signal engager and (b) a stromal modifying moiety;
   [1269] (32) A comprises a first antigen binding domain that preferentially binds to TRBC1 or TRBC2, B comprises a second antigen binding domain that preferentially binds to TRBC1 or TRBC2, and C or D comprises (a) an immune cell engager, e.g., an NK cell engager, e.g., an anti-NKp30, anti-NKp46, anti-NKG2D, or anti-CD16 antibody molecule, and (b) a cytokine molecule;
   [1270] (33) A comprises a first antigen binding domain that preferentially binds to TRBC1 or TRBC2, B comprises a second antigen binding domain that preferentially binds to TRBC1 or TRBC2, and C or D comprises (a) an immune cell engager, e.g., an NK cell engager, e.g., an anti-NKp30, anti-NKp46, anti-NKG2D, or anti-CD16 antibody molecule, and (b) a cytokine inhibitor molecule;
   [1271] (34) A comprises a first antigen binding domain that preferentially binds to TRBC1 or TRBC2, B comprises a second antigen binding domain that preferentially binds to TRBC1 or TRBC2, and C or D comprises (a) an immune cell engager, e.g., an NK cell engager, e.g., an anti-NKp30, anti-NKp46, anti-NKG2D, or anti-CD16 antibody molecule, and (b) a death receptor signal engager;
   [1272] (35) A comprises a first antigen binding domain that preferentially binds to TRBC1 or TRBC2, B comprises a second antigen binding domain that preferentially binds to TRBC1 or TRBC2, and C or D comprises (a) an immune cell engager, e.g., an NK cell engager, e.g., an anti-NKp30, anti-NKp46, anti-NKG2D, or anti-CD16 antibody molecule, and (b) a stromal modifying moiety;
   [1273] (36) A comprises a first antigen binding domain that preferentially binds to TRBC1 or TRBC2, B comprises a second antigen binding domain that preferentially binds to TRBC1 or TRBC2, and C or D comprises (a) an immune cell engager, e.g., a T cell engager, e.g., an anti-TCRβV antibody molecule, and (b) a cytokine molecule;
   [1274] (37) A comprises a first antigen binding domain that preferentially binds to TRBC1 or TRBC2, B comprises a second antigen binding domain that preferentially binds to TRBC1 or TRBC2, and C or D comprises (a) an immune cell engager, e.g., a T cell engager, e.g., an anti-TCRβV antibody molecule, and (b) a cytokine inhibitor molecule;
   [1275] (38) A comprises a first antigen binding domain that preferentially binds to TRBC1 or TRBC2, B comprises a second antigen binding domain that preferentially binds to TRBC1 or TRBC2, and C or D comprises (a) an immune cell engager, e.g., a T cell engager, e.g., an anti-TCRβV antibody molecule, and (b) a death receptor signal engager;
   [1276] (39) A comprises a first antigen binding domain that preferentially binds to TRBC1 or TRBC2, B comprises a second antigen binding domain that preferentially binds to TRBC1 or TRBC2, and C or D comprises (a) an immune cell engager, e.g., a T cell engager, e.g., an anti-TCRβV antibody molecule, and (b) a stromal modifying moiety;
   [1277] (40) A comprises a first antigen binding domain that preferentially binds to TRBC1 or TRBC2, B comprises a second antigen binding domain that preferentially binds to TRBC1 or TRBC2, and C or D comprises (a) a cytokine molecule and (b) a stromal modifying moiety;
   [1278] (41) A comprises a first antigen binding domain that preferentially binds to TRBC1 or TRBC2, B comprises a second antigen binding domain that preferentially binds to TRBC1 or TRBC2, and C or D comprises (a) a cytokine molecule and (b) a death receptor signal engager;
   [1279] (42) A comprises a first antigen binding domain that preferentially binds to TRBC1 or TRBC2, B comprises a second antigen binding domain that preferentially binds to TRBC1 or TRBC2, and C or D comprises (a) a cytokine inhibitor molecule and (b) a stromal modifying moiety;
   [1280] (43) A comprises a first antigen binding domain that preferentially binds to TRBC1 or TRBC2, B comprises a second antigen binding domain that preferentially binds to TRBC1 or TRBC2, and C or D comprises (a) a cytokine inhibitor molecule and (b) a death receptor signal engager;
   [1281] (44) A comprises a first antigen binding domain that preferentially binds to TRBC1 or TRBC2, B comprises a second antigen binding domain that preferentially binds to TRBC1 or TRBC2, and C or D comprises (a) a stromal modifying moiety and (b) a death receptor signal engager;
   [1282] (45) A comprises a first antigen binding domain that preferentially binds to TRBC1 or TRBC2, C comprises a second antigen binding domain that preferentially binds to TRBC1 or TRBC2, and B or D comprises (a) an immune cell engager, e.g., an NK cell engager, e.g., an anti-NKp30, anti-NKp46, anti-NKG2D, or anti-CD16 antibody molecule, and (b) a cytokine molecule;
   [1283] (46) A comprises a first antigen binding domain that preferentially binds to TRBC1 or TRBC2, C comprises a second antigen binding domain that preferentially binds to TRBC1 or TRBC2, and B or D comprises (a) an immune cell engager, e.g., an NK cell engager, e.g., an anti-NKp30, anti-NKp46, anti-NKG2D, or anti-CD16 antibody molecule, and (b) a cytokine inhibitor molecule;
   [1284] (47) A comprises a first antigen binding domain that preferentially binds to TRBC1 or TRBC2, C comprises a second antigen binding domain that preferentially binds to TRBC1 or TRBC2, and B or D comprises (a) an immune cell engager, e.g., an NK cell engager, e.g., an anti-NKp30, anti-NKp46, anti-NKG2D, or anti-CD16 antibody molecule, and (b) a death receptor signal engager;
   [1285] (48) A comprises a first antigen binding domain that preferentially binds to TRBC1 or TRBC2, C comprises a second antigen binding domain that preferentially binds to TRBC1 or TRBC2, and B or D comprises (a) an immune cell engager, e.g., an NK cell engager, e.g., an anti-NKp30, anti-NKp46, anti-NKG2D, or anti-CD16 antibody molecule, and (b) a stromal modifying moiety;
   [1286] (49) A comprises a first antigen binding domain that preferentially binds to TRBC1 or TRBC2, C comprises a second antigen binding domain that preferentially binds to TRBC1 or TRBC2, and B or D comprises (a) an immune cell engager, e.g., a T cell engager, e.g., an anti-TCRβV antibody molecule, and (b) a cytokine molecule;
   [1287] (50) A comprises a first antigen binding domain that preferentially binds to TRBC1 or TRBC2, C comprises a second antigen binding domain that preferentially binds to TRBC1 or TRBC2, and B or D comprises (a) an immune cell engager, e.g., a T cell engager, e.g., an anti-TCRβV antibody molecule, and (b) a cytokine inhibitor molecule;
   [1288] (51) A comprises a first antigen binding domain that preferentially binds to TRBC1 or TRBC2, C comprises a second antigen binding domain that preferentially binds to TRBC1 or TRBC2, and B or D comprises (a) an immune cell engager, e.g., a T cell engager, e.g., an anti-TCRβV antibody molecule, and (b) a death receptor signal engager;
   [1289] (52) A comprises a first antigen binding domain that preferentially binds to TRBC1 or TRBC2, C comprises a second antigen binding domain that preferentially binds to TRBC1 or TRBC2, and B or D comprises (a) an immune cell engager, e.g., a T cell engager, e.g., an anti-TCRβV antibody molecule, and (b) a stromal modifying moiety;
   [1290] (53) A comprises a first antigen binding domain that preferentially binds to TRBC1 or TRBC2, C comprises a second antigen binding domain that preferentially binds to TRBC1 or TRBC2, and B or D comprises (a) a cytokine molecule and (b) a stromal modifying moiety;
   [1291] (54) A comprises a first antigen binding domain that preferentially binds to TRBC1 or TRBC2, C comprises a second antigen binding domain that preferentially binds to TRBC1 or TRBC2, and B or D comprises (a) a cytokine molecule and (b) a death receptor signal engager;
   [1292] (55) A comprises a first antigen binding domain that preferentially binds to TRBC1 or TRBC2, C comprises a second antigen binding domain that preferentially binds to TRBC1 or TRBC2, and B or D comprises (a) a cytokine inhibitor molecule and (b) a stromal modifying moiety;
   [1293] (56) A comprises a first antigen binding domain that preferentially binds to TRBC1 or TRBC2, C comprises a second antigen binding domain that preferentially binds to TRBC1 or TRBC2, and B or D comprises (a) a cytokine inhibitor molecule and (b) a death receptor signal engager; or
   [1294] (57) A comprises a first antigen binding domain that preferentially binds to TRBC1 or TRBC2, C comprises a second antigen binding domain that preferentially binds to TRBC1 or TRBC2, and B or D comprises (a) a stromal modifying moiety and (b) a death receptor signal engager.
[1295] 123. The multifunctional molecule of embodiment 121 or 122, wherein the dimerization module comprises one or more immunoglobulin chain constant regions (e.g., Fc regions) comprising one or more of a paired cavity-protuberance (“knob-in-a hole”), an electrostatic interaction, or a strand-exchange.
[1296] 124. The multifunctional molecule of embodiment 123, wherein the one or more immunoglobulin chain constant regions (e.g., Fc regions) comprise an amino acid substitution at a position chosen from one or more of 347, 349, 350, 351, 366, 368, 370, 392, 394, 395, 397, 398, 399, 405, 407, or 409, e.g., of the Fc region of human IgG1, optionally wherein the one or more immunoglobulin chain constant regions (e.g., Fc regions) comprise an amino acid substitution chosen from: T366S, L368A, or Y407V (e.g., corresponding to a cavity or hole), or T366W (e.g., corresponding to a protuberance or knob), or a combination thereof.
[1297] 125. The multifunctional molecule of any one of embodiments 1-124, further comprising a linker, e.g., a linker between one or more of the antigen binding domain and the immune cell engager, the antigen binding domain and the cytokine molecule, the antigen binding domain and the stromal modifying moiety, the immune cell engager and the cytokine molecule, the immune cell engager and the stromal modifying moiety, the cytokine molecule and the stromal modifying moiety, the antigen binding domain and the dimerization module, the immune cell engager and the dimerization module, the cytokine molecule and the dimerization module, or the stromal modifying moiety and the dimerization module.
[1298] 126. The multifunctional molecule of embodiment 125, wherein the linker is chosen from: a cleavable linker, a non-cleavable linker, a peptide linker, a flexible linker, a rigid linker, a helical linker, or a non-helical linker.
[1299] 127. The multifunctional molecule of embodiment 125 or 126, wherein the linker is a peptide linker.
[1300] 128. The multifunctional molecule of embodiment 127, wherein the peptide linker comprises Gly and Ser.
[1301] 129. The multifunctional molecule of embodiment 128, wherein the peptide linker comprises an amino acid sequence chosen from SEQ ID NOs: 7249-7252 or 75-78.
[1302] 130. A multifunctional molecule, comprising:
   [1303] (i) a first antigen binding domain that preferentially binds to TRBC1, and
   [1304] (ii) an NK cell engager, e.g., an anti-NKp30 antibody molecule, anti-NKp46 antibody molecule, an anti-NKG2D antibody molecule, or an anti-CD16 antibody molecule.
[1305] 131. The multifunctional molecule of embodiment 130, wherein the NK cell engager comprises an anti-NKp30 antibody molecule.
[1306] 132. The multifunctional molecule of embodiment 130, wherein the NK cell engager comprises an anti-NKp46 antibody molecule.
[1307] 133. The multifunctional molecule of embodiment 130, wherein the NK cell engager comprises an anti-NKG2D antibody molecule.
[1308] 134. The multifunctional molecule of embodiment 130, wherein the NK cell engager comprises an anti-CD16 antibody molecule.
[1309] 135. A multifunctional molecule, comprising:
   [1310] (i) a first antigen binding domain that preferentially binds to TRBC1, and
   [1311] (ii) a death receptor signal engager.
[1312] 136. A multifunctional molecule, comprising:
   [1313] (i) a first antigen binding domain that preferentially binds to TRBC1, and
   [1314] (ii) a T cell engager, e.g., an antigen binding domain that binds to TCR beta V chain (TCRBV).
[1315] 137. A multifunctional molecule, comprising:
   [1316] (i) a first antigen binding domain that preferentially binds to TRBC1, and
   [1317] (ii) a cytokine inhibitor molecule, e.g., TGF-beta inhibitor.
[1318] 138. The multifunctional molecule of any of embodiments 1 or 3-137, wherein the multifunctional molecule binds to TRBC1, TRBC2, or the tumor antigen monovalently.
[1319] 139. The multifunctional molecule of any one of embodiments 1 or 3-137, wherein the multifunctional molecule binds to TRBC1, TRBC2, or the tumor antigen multivalently, e.g., di-, tri-, tetra-, penta-, hexa-, hepta-, octa-, nona-, or deca-valently.
[1320] 140. The multifunctional molecule of any of embodiments 2-137, wherein the multifunctional molecule binds to TRBC1, TRBC2, or the lymphocyte expressing TRBC1 or TRBC2 monovalently.
[1321] 141. The multifunctional molecule of any one of embodiments 2-137, wherein the multifunctional molecule binds to the lymphocyte expressing TRBC1 or TRBC2 multivalently, e.g., di-, tri-, tetra-, penta-, hexa-, hepta-, octa-, nona-, or deca-valently.
[1322] 142. The multifunctional molecule of any preceding embodiment, wherein the multifunctional molecule binds, e.g., via the immune cell engager, to the immune cell monovalently.
[1323] 143. The multifunctional molecule of any one of embodiments 1-141, wherein the multifunctional molecule binds, e.g., via the immune cell engager, to the immune cell multivalently, e.g., di-, tri-, tetra-, penta-, hexa-, hepta-, octa-, nona-, or deca-valently.
[1324] 144. The multifunctional molecule of any preceding embodiment, further comprising a heavy chain constant region, e.g., an Fc region, that mediates antibody dependent cellular cytotoxicity (ADCC).
[1325] 145. The multifunctional molecule of any preceding embodiment, further comprising a heavy chain constant region, e.g., an Fc region, that mediates antibody dependent cellular phagocytosis (ADCP).
[1326] 146. The multifunctional molecule of embodiment 145, wherein the first antigen binding domain that binds TRBC1 or TRBC2 comprises an IgG2 heavy chain constant region or the immune cell engager, cytokine inhibitor molecule, or death receptor signal engager comprise an IgG2 heavy chain constant region.
[1327] 147. The multifunctional molecule of any preceding embodiment, further comprising a heavy chain constant region, e.g., an Fc region, that mediates complement dependent cytotoxicity (e.g., via C1q).
[1328] 148. An antibody molecule that binds TRBC1, comprising one or more CDRs, framework regions, variable domains, heavy or light chains, or an antigen binding domain chosen from Tables 2-5, or a sequence substantially identical thereto.
[1329] 149. The antibody molecule of embodiment 148, comprising a heavy chain variable region (VH) comprising a heavy chain framework region 1 (VHFWR1) amino acid sequence of SEQ ID NO: 215 (or a sequence with no more than 1, 2, 3, 4, 5, or 6 mutations, e.g., substitutions, additions, or deletions, therefrom), a VHFWR2 amino acid sequence of SEQ ID NO: 216 (or a sequence with no more than 1, 2, 3, 4, 5, or 6 mutations, e.g., substitutions, additions, or deletions, therefrom), a VHFWR3 amino acid sequence of SEQ ID NO: 217 (or a sequence with no more than 1, 2, 3, 4, 5, or 6 mutations, e.g., substitutions, additions, or deletions, therefrom), or a VHFWR4 amino acid sequence of SEQ ID NO: 218 (or a sequence with no more than 1, 2, 3, 4, 5, or 6 mutations, e.g., substitutions, additions, or deletions, therefrom).
[1330] 150. The antibody molecule of either of embodiments 148 or 149, comprising a light chain variable region (VL) comprising a light chain framework region 1 (VLFWR1) amino acid sequence of SEQ ID NO: 238 (or a sequence with no more than 1, 2, 3, 4, 5, or 6 mutations, e.g., substitutions, additions, or deletions, therefrom), a VLFWR2 amino acid sequence of SEQ ID NO: 239 (or a sequence with no more than 1, 2, 3, 4, 5, or 6 mutations, e.g., substitutions, additions, or deletions, therefrom), a VLFWR3 amino acid sequence of SEQ ID NO: 240 (or a sequence with no more than 1, 2, 3, 4, 5, or 6 mutations, e.g., substitutions, additions, or deletions, therefrom), or a VLFWR4 amino acid sequence of SEQ ID NO: 241 (or a sequence with no more than 1, 2, 3, 4, 5, or 6 mutations, e.g., substitutions, additions, or deletions, therefrom).
[1331] 151. The antibody molecule of any of embodiments 148-150, wherein the antibody molecule comprises a VH comprising the amino acid sequence of SEQ ID NO: 253 (or an amino acid sequence having at least about 75%, 80%, 85%, 90%, 95%, or 99% sequence identity thereto).
[1332] 152. The antibody molecule of any of embodiments 148-151, wherein the antibody molecule comprises a VL comprising the amino acid sequence of SEQ ID NO: 258 (or an amino acid sequence having at least about 93%, 95%, or 99% sequence identity thereto).
[1333] 153. A nucleic acid molecule encoding the multifunctional molecule or antibody molecule of any one of embodiments 1-152.
[1334] 154. A vector, e.g., an expression vector, comprising the nucleic acid molecules of embodiment 153.
[1335] 155. A host cell comprising the nucleic acid molecule of embodiment 153 or the vector of embodiment 154.
[1336] 156. A method of making, e.g., producing, the multifunctional molecule or antibody molecule of any one of embodiments 1-152, comprising culturing the host cell of embodiment 155, under suitable conditions, e.g., conditions suitable for gene expression and/or homo- or heterodimerization.
[1337] 157. A pharmaceutical composition comprising the multifunctional molecule of any one of embodiments 1-152 and a pharmaceutically acceptable carrier, excipient, or stabilizer.
[1338] 158. A method of treating a cancer, comprising administering to a subject in need thereof the multifunctional molecule of any one of embodiments 1-152, wherein the multifunctional molecule is administered in an amount effective to treat the cancer.
[1339] 159. The method of embodiment 158, further comprising identifying, evaluating, or selecting a subject in need of treatment, wherein identifying, evaluating, or selecting comprises determining (e.g., directly determining or indirectly determining, e.g., obtaining information regarding) whether a subject has cancer cells that express a T cell receptor comprising TRBC1 or TRBC2.
[1340] 160. The method of embodiment 159, further comprising, responsive to determining that a subject has cancer cells that express a T cell receptor comprising TRBC1: optionally, selecting the subject for treatment with a multifunctional molecule comprising an antigen binding domain that binds to a T cell receptor comprising TRBC1, and administering a multifunctional molecule comprising an antigen binding domain that binds to a T cell receptor comprising TRBC1.
[1341] 161. The method of embodiment 160, further comprising not administering a multifunctional molecule comprising an antigen binding domain that binds to a T cell receptor comprising TRBC2.
[1342] 162. A method of treating a cancer, e.g., a lymphoma or leukemia, comprising:
   [1343] responsive to determining that a subject has cancer cells that express a T cell receptor comprising TRBC1, administering to a subject in need thereof the multifunctional molecule of any one of embodiments 1-152, wherein the multifunctional molecule is administered in an amount effective to treat the cancer.
[1344] 163. The method of embodiment 162, further comprising, responsive to determining that a subject has cancer cells that express a T cell receptor comprising TRBC2: optionally, selecting the subject for treatment with a multifunctional molecule comprising an antigen binding domain that binds to a T cell receptor comprising TRBC2, and administering a multifunctional molecule comprising an antigen binding domain that binds to a T cell receptor comprising TRBC2.
[1345] 164. The method of embodiment 163, further comprising not administering a multifunctional molecule comprising an antigen binding domain that binds to a T cell receptor comprising TRBC1.
[1346] 165. The method of any of embodiments 158-162, wherein the subject has cancer cells that express a T cell receptor comprising TRBC1.
[1347] 166. The method of any of embodiments 158, 159, 163, or 164, wherein the subject has cancer cells that express a T cell receptor comprising TRBC2.
[1348] 167. A method of identifying a subject in need of treatment for cancer using a multifunctional molecule or antibody molecule of any of embodiments 1-152, comprising determining (e.g., directly determining or indirectly determining, e.g., obtaining information regarding) whether a subject has cancer cells that express a T cell receptor comprising TRBC1 or TRBC2, wherein: responsive to determining that the subject has cancer cells that express a T cell receptor comprising TRBC1, identifying the subject as a candidate for treatment using a multifunctional molecule comprising an antigen binding domain that binds to TRBC1, and optionally not as a candidate for treatment using a multifunctional molecule comprising an antigen binding domain that binds to TRBC2, and
   [1349] responsive to determining that the subject has cancer cells that express a T cell receptor comprising TRBC2, identifying the subject as a candidate for treatment using a multifunctional molecule comprising an antigen binding domain that binds to TRBC2, and optionally not as a candidate for treatment using a multifunctional molecule comprising an antigen binding domain that binds to TRBC1.
[1350] 168. The method of embodiment 167, further comprising:
   [1351] responsive to identifying the subject as a candidate for treatment using a multifunctional molecule comprising an antigen binding domain that binds to TRBC1, treating the subject with (e.g., administering to the subject) a multifunctional molecule comprising an antigen binding domain that binds to TRBC1, or
   [1352] responsive to identifying the subject as a candidate for treatment using a multifunctional molecule comprising an antigen binding domain that binds to TRBC2, treating the subject with (e.g., administering to the subject) a multifunctional molecule comprising an antigen binding domain that binds to TRBC2.
[1353] 169. A method of evaluating a subject in need of treatment for cancer, e.g., a lymphoma, comprising determining (e.g., directly determining or indirectly determining, e.g., obtaining information regarding) whether a subject has cancer cells that express a T cell receptor comprising TRBC1 or TRBC2.
[1354] 170. The method of embodiment 169, further comprising responsive to the evaluation, treating the subject with (e.g., administering to the subject) a multifunctional molecule comprising an antigen binding domain that binds to TRBC1 or a multifunctional molecule comprising an antigen binding domain that binds to TRBC2.
[1355] 171. The method of any one of embodiments 158-170, wherein the cancer is a hematological cancer.
[1356] 172. The method of embodiment 171, wherein the hematological cancer is leukemia or lymphoma.
[1357] 173. The method of embodiment 172, wherein the hematological cancer is selected from leukemia (e.g., acute lymphoblastic leukemia (ALL), acute myeloid leukemia (AML), chronic lymphocytic leukemia (CLL), chronic myelogenous leukemia (CML), hairy cell leukemia, acute monocytic leukemia (AMoL), chronic myelomonocytic leukemia (CMML), juvenile myelomonocytic leukemia (JMML), or large granular lymphocytic leukemia), lymphoma (e.g., AIDS-related lymphoma, cutaneous T-cell lymphoma, Hodgkin lymphoma (e.g., classical Hodgkin lymphoma or nodular lymphocyte-predominant Hodgkin lymphoma), mycosis fungoides, non-Hodgkin lymphoma (e.g., B-cell non-Hodgkin lymphoma (e.g., Burkitt lymphoma, small lymphocytic lymphoma (CLL/SLL), diffuse large B-cell lymphoma, follicular lymphoma, immunoblastic large cell lymphoma, precursor B-lymphoblastic lymphoma, or mantle cell lymphoma) or T-cell non-Hodgkin lymphoma (mycosis fungoides, anaplastic large cell lymphoma, or precursor T-lymphoblastic lymphoma)), primary central nervous system lymphoma, Sézary syndrome, Waldenström macroglobulinemia), chronic myeloproliferative neoplasm, Langerhans cell histiocytosis, multiple myeloma/plasma cell neoplasm, myelodysplastic syndrome, or myelodysplastic/myeloproliferative neoplasm.
[1358] 174. The method of embodiment 172, wherein the lymphoma is selected from Acquired immune deficiency syndrome (AIDS)-associated lymphoma, Angioimmunoblastic T-cell lymphoma, Adult T-cell leukemia/lymphoma, Burkitt lymphoma, Central nervous system (CNS) lymphoma, Diffuse large B-cell lymphoma (DLBCL), Lymphoblastic lymphoma, Mantle cell lymphoma (MCL), Peripheral T-cell lymphoma (PTCL) (e.g., Hepatosplenic T-cell lymphoma (HSGDTCL), Subcutaneous paniculitis-like T-cell lymphoma, or Enteropathy-associated T-cell lymphoma), Transformed follicular and transformed mucosa-associated lymphoid tissue (MALT) lymphomas, Cutaneous T-cell lymphoma (mycosis fungoides and Sézary syndrome), Follicular lymphoma, Lymphoplasmacytic lymphoma/Waldenström macroglobulinemia, Marginal zone B-cell lymphoma, Gastric mucosa-associated lymphoid tissue (MALT) lymphoma, Chronic lymphocytic leukemia/small-cell lymphocytic lymphoma (CLL/SLL), Extranodal T-/NK-cell lymphoma (nasal type), or Anaplastic large-cell lymphoma (e.g., primary cutaneous anaplastic large-cell lymphoma or systemic anaplastic large-cell lymphoma).
[1359] 175. The method of any one of embodiments 158-170, the cancer is a solid tumor cancer.
[1360] 176. The method of any of embodiments 158-175, further comprising administering a second therapeutic treatment.
[1361] 177. The method of embodiment 176, wherein the second therapeutic treatment comprises a therapeutic agent (e.g., a chemotherapeutic agent, a biologic agent, hormonal therapy), radiation, or surgery.
[1362] 178. The method of embodiment 177, wherein the therapeutic agent is selected from: a chemotherapeutic agent, or a biologic agent.

### Exemplary Embodiment 6

[1363] A1. A multifunctional molecule, comprising:
   [1364] (i) a first antigen binding domain that binds to T cell receptor beta chain constant domain 2 (TRBC2), and
   [1365] (ii) a second antigen binding domain that binds to NKp30,
   [1366] wherein the first antigen binding domain comprises one or more CDRs, framework regions, variable regions, or antigen binding domains disclosed in any of Tables 21-25, or a sequence having at least 85%, 90%, 95%, or 99% identity thereto.
[1367] A2. The multifunctional molecule of embodiment A1, wherein the first antigen binding domain comprises a VH comprising a heavy chain complementarity determining region 1 (VHCDR1), a VHCDR2, and a VHCDR3, and a VL comprising a light chain complementarity determining region 1 (VLCDR1), a VLCDR2, and a VLCDR3, wherein:
   [1368] the VHCDR1, VHCDR2, and VHCDR3 comprise the amino acid sequences of GXlX2MH, wherein X1 is Y or F, and X2 is P, H, V, Y, K, or A, and SEQ ID NOs: 201 and 7442, respectively; or the VLCDR1, VLCDR2, and VLCDR3 comprise the amino acid sequences of SEQ ID NOs: 7443, 224, and 225, respectively.
[1369] A3. The multifunctional molecule of embodiment A2, wherein the VHCDR1, VHCDR2, and VHCDR3 comprise the amino acid sequences of:
   [1370] SEQ ID NOs: 7422, 201, and 7403, respectively;
   [1371] SEQ ID NOs: 7401, 201, and 7403, respectively;
   [1372] SEQ ID NOs: 7394, 201, and 7396, respectively;
   [1373] SEQ ID NOs: 7346, 201, and 7398, respectively;
   [1374] SEQ ID NOs: 7346, 201, and 7400, respectively;
   [1375] SEQ ID NOs: 7405, 201, and 7403, respectively;
   [1376] SEQ ID NOs: 7407, 201, and 7403, respectively;
   [1377] SEQ ID NOs: 7427, 201, and 7403, respectively; or
   [1378] SEQ ID NOs: 7430, 201, and 7403, respectively.
[1379] A4. The multifunctional molecule of embodiment A2 or A3, wherein the VLCDR1, VLCDR2, and VLCDR3 comprise the amino acid sequences of:
   [1380] SEQ ID NOs: 7410, 224, and 225, respectively; or
   [1381] SEQ ID NOs: 7409, 224, and 225, respectively.
[1382] A5. The multifunctional molecule of any of embodiments A2-A4, wherein the VHCDR1, VHCDR2, VHCDR3, VLCDR1, VLCDR2, and VLCDR3 comprise the amino acid sequences of:
   [1383] SEQ ID NOs: 7422, 201, 7403, 7410, 224, and 225, respectively;
   [1384] SEQ ID NOs: 7401, 201, 7403, 7410, 224, and 225, respectively;
   [1385] SEQ ID NOs: 7394, 201, 7396, 7410, 224, and 225, respectively;
   [1386] SEQ ID NOs: 7346, 201, 7398, 7410, 224, and 225, respectively;
   [1387] SEQ ID NOs: 7346, 201, 7400, 7410, 224, and 225, respectively;
   [1388] SEQ ID NOs: 7405, 201, 7403, 7410, 224, and 225, respectively;
   [1389] SEQ ID NOs: 7407, 201, 7403, 7410, 224, and 225, respectively;
   [1390] SEQ ID NOs: 7427, 201, 7403, 7410, 224, and 225, respectively;
   [1391] SEQ ID NOs: 7430, 201, 7403, 7410, 224, and 225, respectively;
   [1392] SEQ ID NOs: 7422, 201, 7403, 7409, 224, and 225, respectively;
   [1393] SEQ ID NOs: 7401, 201, 7403, 7409, 224, and 225, respectively;
   [1394] SEQ ID NOs: 7394, 201, 7396, 7409, 224, and 225, respectively;
   [1395] SEQ ID NOs: 7346, 201, 7398, 7409, 224, and 225, respectively;
   [1396] SEQ ID NOs: 7346, 201, 7400, 7409, 224, and 225, respectively;
   [1397] SEQ ID NOs: 7405, 201, 7403, 7409, 224, and 225, respectively;
   [1398] SEQ ID NOs: 7407, 201, 7403, 7409, 224, and 225, respectively;
   [1399] SEQ ID NOs: 7427, 201, 7403, 7409, 224, and 225, respectively; or
   [1400] SEQ ID NOs: 7430, 201, 7403, 7409, 224, and 225, respectively.
[1401] A6. The multifunctional molecule of any of embodiments A2-A5, wherein the VH comprises an amino acid sequence selected from the group consisting of SEQ ID NOs: 7420, 7423, 7411, 7412, 7413, 7414, 7415, 7416, 7417, 7425, 7428, and 7431 (or a sequence having at least 85%, 90%, 95%, or 99% identity thereto) and/or the VL comprises an amino acid sequence selected from the group consisting of SEQ ID NOs: 7419 and 7418 (or a sequence having at least 85%, 90%, 95%, or 99% identity thereto).
[1402] A7. The multifunctional molecule of any of embodiments A2-A6, wherein the VH and VL comprise the amino acid sequences of:
   [1403] SEQ ID NOs: 7420 and 7419, respectively (or a sequence having at least 85%, 90%, 95%, or 99% identity thereto);
   [1404] SEQ ID NOs: 7423 and 7419, respectively (or a sequence having at least 85%, 90%, 95%, or 99% identity thereto);
   [1405] SEQ ID NOs: 7411 and 7419, respectively (or a sequence having at least 85%, 90%, 95%, or 99% identity thereto);
   [1406] SEQ ID NOs: 7412 and 7419, respectively (or a sequence having at least 85%, 90%, 95%, or 99% identity thereto);
   [1407] SEQ ID NOs: 7413 and 7419, respectively (or a sequence having at least 85%, 90%, 95%, or 99% identity thereto);
   [1408] SEQ ID NOs: 7414 and 7419, respectively (or a sequence having at least 85%, 90%, 95%, or 99% identity thereto);
   [1409] SEQ ID NOs: 7415 and 7419, respectively (or a sequence having at least 85%, 90%, 95%, or 99% identity thereto);
   [1410] SEQ ID NOs: 7416 and 7419, respectively (or a sequence having at least 85%, 90%, 95%, or 99% identity thereto);
   [1411] SEQ ID NOs: 7417 and 7419, respectively (or a sequence having at least 85%, 90%, 95%, or 99% identity thereto);
   [1412] SEQ ID NOs: 7425 and 7419, respectively (or a sequence having at least 85%, 90%, 95%, or 99% identity thereto);
   [1413] SEQ ID NOs: 7428 and 7419, respectively (or a sequence having at least 85%, 90%, 95%, or 99% identity thereto);
   [1414] SEQ ID NOs: 7431 and 7419, respectively (or a sequence having at least 85%, 90%, 95%, or 99% identity thereto);
   [1415] SEQ ID NOs: 7420 and 7418, respectively (or a sequence having at least 85%, 90%, 95%, or 99% identity thereto);
   [1416] SEQ ID NOs: 7423 and 7418, respectively (or a sequence having at least 85%, 90%, 95%, or 99% identity thereto);
   [1417] SEQ ID NOs: 7411 and 7418, respectively (or a sequence having at least 85%, 90%, 95%, or 99% identity thereto);
   [1418] SEQ ID NOs: 7412 and 7418, respectively (or a sequence having at least 85%, 90%, 95%, or 99% identity thereto);
   [1419] SEQ ID NOs: 7413 and 7418, respectively (or a sequence having at least 85%, 90%, 95%, or 99% identity thereto);
   [1420] SEQ ID NOs: 7414 and 7418, respectively (or a sequence having at least 85%, 90%, 95%, or 99% identity thereto);
   [1421] SEQ ID NOs: 7415 and 7418, respectively (or a sequence having at least 85%, 90%, 95%, or 99% identity thereto);
   [1422] SEQ ID NOs: 7416 and 7418, respectively (or a sequence having at least 85%, 90%, 95%, or 99% identity thereto);
   [1423] SEQ ID NOs: 7417 and 7418, respectively (or a sequence having at least 85%, 90%, 95%, or 99% identity thereto);
   [1424] SEQ ID NOs: 7425 and 7418, respectively (or a sequence having at least 85%, 90%, 95%, or 99% identity thereto);
   [1425] SEQ ID NOs: 7428 and 7418, respectively (or a sequence having at least 85%, 90%, 95%, or 99% identity thereto);
   [1426] SEQ ID NOs: 7431 and 7418, respectively (or a sequence having at least 85%, 90%, 95%, or 99% identity thereto).
[1427] A8. The multifunctional molecule of any of embodiments A1-A7, wherein:
   [1428] (i) the first antigen binding domain has a higher affinity for a T cell receptor comprising TRBC2 than for a T cell receptor not comprising TRBC2, optionally wherein the KD for the binding between the first antigen binding domain and TRBC2 is no more than 40%, 30%, 20%, 10%, 1%, 0.1%, or 0.01% of the KD for the binding between the first antigen binding domain and a T cell receptor not comprising TRBC2;
   [1429] (ii) the first antigen binding domain has a higher affinity for a T cell receptor comprising TRBC2 than for a T cell receptor comprising TRBC1, optionally wherein the K_{D} for the binding between the first antigen binding domain and TRBC2 is no more than 40%, 30%, 20%, 10%, 1%, 0.1%, or 0.01% of the K_{D} for the binding between the first antigen binding domain and a T cell receptor comprising TRBC1; or
   [1430] (iii) binding of the first antigen binding domain to TRBC2 on a lymphoma cell or lymphocyte, e.g., T cell, does not appreciably activate the lymphoma cell or lymphocyte, e.g., T cell, e.g., as measured by T cell proliferation, expression of a T cell activation marker (e.g., CD69 or CD25), and/or expression of a cytokine (e.g., TNFα and IFNγ).
[1431] A9. The multifunctional molecule of any of embodiments A1-A8, wherein the second antigen binding domain comprises one or more CDRs, framework regions, variable regions, or antigen binding domains disclosed in any of Tables 7, 8, 8A, 8B, 9, -10, 18, and 25, or a sequence having at least 85%, 90%, 95%, or 99% identity thereto.
[1432] A10. The multifunctional molecule of any of embodiments A1-A9, wherein the second antigen binding domain comprises a VH comprising a heavy chain complementarity determining region 1 (VHCDR1), a VHCDR2, and a VHCDR3, and a VL comprising a light chain complementarity determining region 1 (VLCDR1), a VLCDR2, and a VLCDR3, wherein the VHCDR1, VHCDR2, and VHCDR3 of the second antigen binding domain comprise the amino acid sequences of:
   [1433] SEQ ID NOs: 7313, 6001, and 7315, respectively;
   [1434] SEQ ID NOs: 7313, 6001, and 6002, respectively;
   [1435] SEQ ID NOs: 7313, 6008, and 6009, respectively;
   [1436] SEQ ID NOs: 7313, 7385, and 7315, respectively; or
   [1437] SEQ ID NOs: 7313, 7318, and 6009, respectively;
   [1438] SEQ ID NOs: 375, 377, and 379, respectively;
   [1439] SEQ ID NOs: 389, 391, and 393, respectively;
   [1440] SEQ ID NOs: 403, 405, and 407, respectively;
   [1441] SEQ ID NOs: 417, 419, and 421, respectively;
   [1442] SEQ ID NOs: 431, 433, and 435, respectively;
   [1443] SEQ ID NOs: 445, 447, and 449, respectively;
   [1444] SEQ ID NOs: 459, 461, and 463, respectively; or
   [1445] SEQ ID NOs: 472, 474, and 476, respectively.
[1446] A11. The multifunctional molecule of embodiment A10, wherein the VLCDR1, VLCDR2, and VLCDR3 of the second antigen binding domain comprise the amino acid sequences of:
   [1447] SEQ ID NOs: 7326, 7327, and 7329, respectively;
   [1448] SEQ ID NOs: 6063, 6064, and 7293, respectively;
   [1449] SEQ ID NOs: 6070, 6071, and 6072, respectively; or
   [1450] SEQ ID NOs: 6070, 6064, and 7321, respectively;
   [1451] SEQ ID NOs: 382, 384, and 386, respectively;
   [1452] SEQ ID NOs: 396, 398, and 400, respectively;
   [1453] SEQ ID NOs: 410, 412, and 414, respectively;
   [1454] SEQ ID NOs: 424, 426, and 428, respectively;
   [1455] SEQ ID NOs: 438, 440, and 442, respectively;
   [1456] SEQ ID NOs: 452, 454, and 456, respectively;
   [1457] SEQ ID NOs: 466, 468, and 469, respectively;
   [1458] SEQ ID NOs: 479, 481, and 483, respectively.
[1459] A12. The multifunctional molecule of embodiment A10 or A11, wherein the VHCDR1, VHCDR2, VHCDR3, VLCDR1, VLCDR2, and VLCDR3 of the second antigen binding domain comprise the amino acid sequences of:
   [1460] SEQ ID NOs: 7313, 6001, 7315, 7326, 7327, and 7329, respectively;
   [1461] SEQ ID NOs: 7313, 6001, 6002, 6063, 6064, and 7293, respectively;
   [1462] SEQ ID NOs: 7313, 6008, 6009, 6070, 6071, and 6072, respectively;
   [1463] SEQ ID NOs: 7313, 7385, 7315, 6070, 6064, and 7321, respectively; or
   [1464] SEQ ID NOs: 7313, 7318, 6009, 6070, 6064, and 7321, respectively;
   [1465] SEQ ID NOs: 375, 377, 379, 382, 384, and 386, respectively;
   [1466] SEQ ID NOs: 389, 391, 393, 396, 398, and 400, respectively;
   [1467] SEQ ID NOs: 403, 405, 407, 410, 412, and 414, respectively;
   [1468] SEQ ID NOs: 417, 419, 421, 424, 426, and 428, respectively;
   [1469] SEQ ID NOs: 431, 433, 435, 438, 440, and 442, respectively;
   [1470] SEQ ID NOs: 445, 447, 449, 452, 454, and 456, respectively;
   [1471] SEQ ID NOs: 459, 461, 463, 466, 468, and 469, respectively; or
   [1472] SEQ ID NOs: 472, 474, 476, 479, 481, and 483, respectively.
[1473] A13. The multifunctional molecule of any of embodiments A10-A12, wherein:
   [1474] (i) the VH of the second antigen binding domain comprises an amino acid sequence selected from the group consisting of SEQ ID NOs: 7302, 7298, 7300, 7301, 7303, and 7304 (or a sequence having at least 85%, 90%, 95%, or 99% identity thereto) and/or the VL of the second antigen binding domain comprises an amino acid sequence selected from the group consisting of SEQ ID NOs: 7309, 7305, 7299, and 7306-7308 (or a sequence having at least 85%, 90%, 95%, or 99% identity thereto);
   [1475] (ii) the VH of the second antigen binding domain comprises an amino acid sequence selected from the group consisting of SEQ ID NOs: 6121 or 6123-6128 (or a sequence having at least 85%, 90%, 95%, or 99% identity thereto) and/or the VL of the second antigen binding domain comprises an amino acid sequence selected from the group consisting of SEQ ID NOs: 7294 or 6137-6141 (or a sequence having at least 85%, 90%, 95%, or 99% identity thereto); or
   [1476] (iii) the VH of the second antigen binding domain comprises an amino acid sequence selected from the group consisting of SEQ ID NOs: 6122 or 6129-6134 (or a sequence having at least 85%, 90%, 95%, or 99% identity thereto) and/or the VL of the second antigen binding domain comprises an amino acid sequence selected from the group consisting of SEQ ID NOs: 6136 or 6142-6147 (or a sequence having at least 85%, 90%, 95%, or 99% identity thereto); or
   [1477] (iv) the VH of the second antigen binding domain comprises an amino acid sequence selected from the group consisting of SEQ ID NOs: 357-364 (or a sequence having at least 85%, 90%, 95%, or 99% identity thereto) and/or the VL of the second antigen binding domain comprises an amino acid sequence selected from the group consisting of SEQ ID NOs: 365-372 (or a sequence having at least 85%, 90%, 95%, or 99% identity thereto).
[1478] A14. The multifunctional molecule of any of embodiments A10-A13, wherein the VH and VL of the second antigen binding domain comprise the amino acid sequences of:
   [1479] SEQ ID NOs: 7302 and 7309, respectively (or a sequence having at least 85%, 90%, 95%, or 99% identity thereto); or
   [1480] SEQ ID NOs: 7302 and 7305, respectively (or a sequence having at least 85%, 90%, 95%, or 99% identity thereto).
[1481] A15. The multifunctional molecule of any of embodiments A10-A14, wherein the second antigen binding domain comprise the amino acid sequences of:
   [1482] SEQ ID NO: 7311 or 7310 (or a sequence having at least 85%, 90%, 95%, or 99% identity thereto);
   [1483] SEQ ID NO: 6187 or 6188 (or a sequence having at least 85%, 90%, 95%, or 99% identity thereto); or
   [1484] SEQ ID NO: 6189 or 6190 (or a sequence having at least 85%, 90%, 95%, or 99% identity thereto); or any of SEQ ID NOs: 373 and 485-491.
[1485] A16. The multifunctional molecule of any of embodiments A1-A15, wherein the multifunctional molecule binds to TRBC2 monovalently.
[1486] A17. The multifunctional molecule of any of embodiments A1-A16, wherein the multifunctional molecule comprises a configuration shown in any of FIGS. 30A-30D, optionally wherein:
   [1487] (i) the multifunctional antibody molecule comprises an anti-TRBC2 Fab and an anti-NKp30 scFv, e.g., comprises a configuration shown in FIG. 30A;
   [1488] (ii) the multifunctional antibody molecule comprises an anti-TRBC2 Fab and an anti-NKp30 Fab, e.g., comprises a configuration shown in FIG. 30B;
   [1489] (iii) the multifunctional antibody molecule comprises an anti-NKp30 Fab and an anti-TRBC2 scFv, e.g., comprises a configuration shown in FIG. 30C; or
   [1490] (iv) the multifunctional antibody molecule comprises an anti-TRBC2 scFv and an anti-NKp30 scFv, e.g., comprises a configuration shown in FIG. 30D.
[1491] A18. The multifunctional molecule of any of embodiments A1-A17, further comprising a dimerization module comprising one or more immunoglobulin chain constant regions (e.g., Fc regions) comprising one or more of: a paired cavity-protuberance (“knob-in-a hole”), an electrostatic interaction, or a strand-exchange.
[1492] A19. The multifunctional molecule of any of embodiments A1-A18, comprising an anti-TRBC2 amino acid sequence disclosed in any of Tables 21-25, or a sequence having at least 85%, 90%, 95%, or 99% identity thereto, and/or an anti-NKp30 amino acid sequence disclosed in any of Tables 7, 8, 8A, 8B, 9, 10, 18, and 25, or a sequence having at least 85%, 90%, 95%, or 99% identity thereto.
[1493] A20. The multifunctional molecule of any of embodiments A1-A19, comprising:
   [1494] (i) an anti-TRBC2 VH of SEQ ID NO: 7420 (or a sequence having at least 85%, 90%, 95%, or 99% identity thereto), an anti-TRBC2 VL of SEQ ID NO: 7419 (or a sequence having at least 85%, 90%, 95%, or 99% identity thereto), an anti-NKp30 VH of SEQ ID NO: 7302 (or a sequence having at least 85%, 90%, 95%, or 99% identity thereto), and an anti-NKp30 VL of SEQ ID NO: 7309 (or a sequence having at least 85%, 90%, 95%, or 99% identity thereto);
   [1495] (ii) an anti-TRBC2 VH of SEQ ID NO: 7420 (or a sequence having at least 85%, 90%, 95%, or 99% identity thereto), an anti-TRBC2 VL of SEQ ID NO: 7419 (or a sequence having at least 85%, 90%, 95%, or 99% identity thereto), and an anti-NKp30 scFv of SEQ ID NO: 7311 (or a sequence having at least 85%, 90%, 95%, or 99% identity thereto); or
   [1496] (iii) SEQ ID NOs: 7438, 7439, and 7383 (or a sequence having at least 85%, 90%, 95%, or 99% identity thereto).
[1497] A21. The multifunctional molecule of any of embodiments A1-A19, comprising:
   [1498] (i) an anti-TRBC2 VH of SEQ ID NO: 7423 (or a sequence having at least 85%, 90%, 95%, or 99% identity thereto), an anti-TRBC2 VL of SEQ ID NO: 7419 (or a sequence having at least 85%, 90%, 95%, or 99% identity thereto), an anti-NKp30 VH of SEQ ID NO: 7302 (or a sequence having at least 85%, 90%, 95%, or 99% identity thereto), and an anti-NKp30 VL of SEQ ID NO: 7309 (or a sequence having at least 85%, 90%, 95%, or 99% identity thereto);
   [1499] (ii) an anti-TRBC2 VH of SEQ ID NO: 7423 (or a sequence having at least 85%, 90%, 95%, or 99% identity thereto), an anti-TRBC2 VL of SEQ ID NO: 7419 (or a sequence having at least 85%, 90%, 95%, or 99% identity thereto), and an anti-NKp30 scFv of SEQ ID NO: 7311 (or a sequence having at least 85%, 90%, 95%, or 99% identity thereto); or
   [1500] (iii) SEQ ID NOs: 7440, 7439, and 7383 (or a sequence having at least 85%, 90%, 95%, or 99% identity thereto).
[1501] A22. A multifunctional molecule, comprising:
   [1502] (i) a first antigen binding domain that binds to T cell receptor beta chain constant domain 1 (TRBC1), and
   [1503] (ii) a second antigen binding domain that binds to NKp30,
   [1504] wherein the first antigen binding domain comprises one or more CDRs, framework regions, variable regions, or antigen binding domains disclosed in any of Tables 3A-3B or 4 (e.g., any of SEQ ID NOs: 261-356), or a sequence having at least 85%, 90%, 95%, or 99% identity thereto.
[1505] A23. The multifunctional molecule of embodiment A22, wherein the second antigen binding domain comprises one or more CDRs, framework regions, variable regions, or antigen binding domains disclosed herein.
[1506] A24. A multifunctional molecule, comprising:
   [1507] (i) a first antigen binding domain that binds to T cell receptor beta chain constant domain 1 (TRBC1), and
   [1508] (ii) a second antigen binding domain that binds to NKp30,
   [1509] wherein the second antigen binding domain comprises one or more CDRs, framework regions, variable regions, or antigen binding domains disclosed in any of Tables 8A-8B, 9, or 10 (e.g., any of SEQ ID NOs 357-484), or a sequence having at least 85%, 90%, 95%, or 99% identity thereto.
[1510] A25. The multifunctional molecule of embodiment A24, wherein the first antigen binding domain comprises one or more CDRs, framework regions, variable regions, or antigen binding domains disclosed herein.
[1511] A26. An antibody molecule that binds to TRBC2, comprising one or more CDRs, framework regions, variable regions, or antigen binding domains disclosed in any of Tables 21-25, or a sequence having at least 85%, 90%, 95%, or 99% identity thereto.
[1512] A27. An antibody molecule that binds to TRBC1, comprising one or more CDRs, framework regions, variable regions, or antigen binding domains disclosed in any of Tables 3A-3B or 4 (e.g., any of SEQ ID NOs: 261-356), or a sequence having at least 85%, 90%, 95%, or 99% identity thereto.
[1513] A28. The multifunctional molecule of any of embodiments A1-A25 or the antibody molecule of embodiment A26 or A27, further comprising a heavy chain constant region variant, e.g., an Fc region variant, that comprises one or more mutations that result in reduced or ablated affinity for at least one Fc receptor, optionally wherein the one or more mutations result in reduced or ablated antibody dependent cell-mediated cytotoxicity (ADCC), Antibody-dependent cellular phagocytosis (ADCP), or complement dependent cytotoxicity (CDC).
[1514] A29. The multifunctional molecule of any of embodiments A1-A25 and A28, or the antibody molecule of any of embodiments A26-A28, wherein the Fc region variant comprises one or more mutations disclosed in Table 20, optionally wherein the Fc region variant comprises an N297A mutation.
[1515] A30. A nucleic acid molecule encoding the multifunctional molecule of any of embodiments multifunctional molecule of any of embodiments A1-A25, A28, and A29, or the antibody molecule of any of embodiments A26-A29.
[1516] A31. A vector, e.g., an expression vector, comprising the nucleic acid molecule of embodiment A30.
[1517] A32. A cell comprising the nucleic acid molecule of embodiment A30 or the vector of embodiment A31.
[1518] A33. A method of making, e.g., producing, the multifunctional molecule of any of embodiments A1-A25, A28, and A29 or the antibody molecule of any of embodiments A26-A29, comprising culturing the cell of embodiment A32, under suitable conditions, e.g., conditions suitable for gene expression and/or homo- or heterodimerization.
[1519] A34. A pharmaceutical composition comprising the multifunctional molecule of any of embodiments A1-A25, A28, and A29 or the antibody molecule of any of embodiments A26-A29 and a pharmaceutically acceptable carrier, excipient, or stabilizer.
[1520] A35. A method of treating a cancer, comprising administering to a subject in need thereof the multifunctional molecule of any of embodiments A1-A25, A28, and A29, wherein the multifunctional molecule is administered in an amount effective to treat the cancer.
[1521] A36. The method of embodiment A35, further comprising identifying, evaluating, or selecting a subject in need of treatment, wherein identifying, evaluating, or selecting comprises determining (e.g., directly determining or indirectly determining, e.g., obtaining information regarding) whether a subject has cancer cells that express a T cell receptor comprising TRBC1 or TRBC2.
[1522] A37. The method of embodiment A35, further comprising, responsive to determining that a subject has cancer cells that express a T cell receptor comprising TRBC1 or TRBC2: optionally, selecting the subject for treatment with a multifunctional molecule comprising an antigen binding domain that binds to a T cell receptor comprising TRBC1 or TRBC2, and administering a multifunctional molecule comprising an antigen binding domain that binds to a T cell receptor comprising TRBC1 or TRBC2.
[1523] A38. A method of treating a cancer, e.g., a lymphoma or leukemia, e.g., a T cell lymphoma or leukemia, comprising:
   [1524] responsive to a determination that a subject has cancer cells that express a T cell receptor comprising TRBC2, administering to the subject the multifunctional molecule of any of embodiments A1-A25, A28, and A29, wherein the multifunctional molecule is administered in an amount effective to treat the cancer.

### Exemplary Embodiment 7

[1525] 1. A method of identifying a subject in need of treatment for cancer, e.g., a lymphoma or leukemia, e.g., a T cell lymphoma or leukemia, using the multifunctional molecule of any of embodiments 1-21D, 23, or 24, comprising determining (e.g., directly determining or indirectly determining, e.g., obtaining information regarding) whether a subject has cancer cells that express a T cell receptor comprising TRBC2, wherein:
   [1526] responsive to a determination that the subject has cancer cells that express a T cell receptor comprising TRBC2, identifying the subject as a candidate for treatment using a multifunctional molecule comprising an antigen binding domain that binds to TRBC2, and optionally not as a candidate for treatment using a multifunctional molecule comprising an antigen binding domain that binds to TRBC1.
[1527] 2. The method of embodiment 1, further comprising:
   [1528] responsive to identifying the subject as a candidate for treatment using a multifunctional molecule comprising an antigen binding domain that binds to TRBC2, treating the subject with (e.g., administering to the subject) a multifunctional molecule as described herein.
[1529] 3. The method of embodiment 1 or 2, wherein the cancer is leukemia or lymphoma.
[1530] 4. The method of any of embodiments 1-3, wherein the cancer is selected from Acquired immune deficiency syndrome (AIDS)-associated lymphoma, Angioimmunoblastic T-cell lymphoma, Adult T-cell leukemia/lymphoma, Burkitt lymphoma, Central nervous system (CNS) lymphoma, Diffuse large B-cell lymphoma (DLBCL), Lymphoblastic lymphoma, Mantle cell lymphoma (MCL), Peripheral T-cell lymphoma (PTCL) (e.g., Hepatosplenic T-cell lymphoma (HSGDTCL), Subcutaneous paniculitis-like T-cell lymphoma, or Enteropathy-associated T-cell lymphoma), Transformed follicular and transformed mucosa-associated lymphoid tissue (MALT) lymphomas, Cutaneous T-cell lymphoma (mycosis fungoides and Sézary syndrome), Follicular lymphoma, Lymphoplasmacytic lymphoma/Waldenström macroglobulinemia, Marginal zone B-cell lymphoma, Gastric mucosa-associated lymphoid tissue (MALT) lymphoma, Chronic lymphocytic leukemia/small-cell lymphocytic lymphoma (CLL/SLL), Extranodal T-/NK-cell lymphoma (nasal type), and Anaplastic large-cell lymphoma (e.g., primary cutaneous anaplastic large-cell lymphoma or systemic anaplastic large-cell lymphoma).
[1531] 5. The method of any of embodiments 1-4, wherein the cancer is Peripheral T-cell lymphoma (PTCL).
[1532] 6. A method of detecting TRBC1 or TRBC2 in a sample or subject, comprising: contacting the sample or subject with an anti-TRBC1 antibody molecule described herein or an anti-TRBC2 antibody molecule described herein; and
   [1533] detecting formation of a complex between the antibody molecule and the sample or subject, thereby detecting TRBC1 or TRBC2.
[1534] 7. The method of embodiment 6, wherein TRBC1 or TRBC2 is detected in vitro or in vivo.
[1535] 8. The method of embodiment 6 or 7, further comprising contacting a reference sample or subject with the antibody molecule; and detecting formation of a complex between the antibody molecule and the reference sample or subject, wherein a change, e.g., a statistically significant change, in the formation of the complex in the sample or subject, relative to the reference sample or subject is indicative of the presence of TRBC1 or TRBC2 in the sample or subject.
[1536] 9. The method of any of embodiments 6-8, further comprising obtaining a sample from a subject.
[1537] 10. The method of any of embodiment 6-9, wherein sample comprises one or more of plasma, tissue (e.g., cancerous tissue), biopsy, blood (e.g., whole blood), PBMCs, bone marrow, and/or lymphatic tissue, e.g., lymph node.
[1538] 11. The method of any of embodiments 6-10, wherein the sample has not been frozen and/or fixed.
[1539] 12. The method of any of embodiments 6-10, wherein the sample has been frozen (e.g., snap frozen) and/or fixed (e.g., formalin-fixed paraffin-embedded (FFPE)).
[1540] 13. The method of any of embodiments 6-12, wherein the subject has, or is at risk of having, a disease or disorder described herein (e.g., cancer, e.g., a lymphoma, e.g., a T cell lymphoma).
[1541] 14. The method of any of embodiments 6-13, further comprising performing a flow analysis, e.g., using a multi-panel method.
[1542] 15. The method of any of embodiments 6-14, further comprising assessing T-cell clonality, e.g., to determine the presence and/or level of T cell malignancy.
[1543] 16. The method of any of embodiments 6-15, further comprising measuring the level of TRBC1+ or TRBC2+ cells from the biological sample (e.g., determining if TRBC1+ or TRBC2+ cells are depleted, e.g., relative to a reference sample or subject).
[1544] 17. The method of any of embodiments 6-16, further comprising measuring the intracellular level of TRBC1 or TRBC2.
[1545] 18. The method of any of embodiments 6-17, further comprising measuring the membrane level of TRBC1 or TRBC2.
[1546] 19. The method of any of embodiments 6-18, further comprising evaluating the subject for a change in prognosis, severity, or presence or absence of a disease or disorder (e.g., cancer), e.g., after treatment (e.g., with an antibody molecule described herein).
[1547] 20. The method of any of embodiments 6-19, wherein the antibody molecule is detectably labeled.
[1548] 21. A method of evaluating a subject, comprising:
   [1549] contacting a sample (e.g., a sample described herein) from the subject with an anti-TRBC1 antibody molecule described herein or an anti-TRBC2 antibody molecule described herein; and
   [1550] detecting formation of a complex between the antibody molecule and the sample, thereby evaluating the subject.
[1551] 22. The method of embodiment 21, wherein the subject has, or is at risk of having, a disease or disorder described herein (e.g., cancer, e.g., a lymphoma, e.g., a T cell lymphoma).
[1552] 23. The method of embodiment 21 or 22, wherein the subject has not been treated with an antibody molecule described herein.
[1553] 24. The method of embodiment 21 or 22, wherein the subject has been treated with an antibody molecule described herein.
[1554] 25. A kit comprising an anti-TRBC1 antibody molecule described herein or an anti-TRBC2 antibody molecule described herein and instructions for use in a method of detecting TRBC1 or TRBC2 in a sample or subject.

The application's sequence listing, which the Patent Office published only in electronic form, follows.

SEQUENCE LISTING (7444 sequences)

SEQ ID NO: 1 - protein, 119 aa, synthetic construct
QVQLQQSGPELVKPGTSVKISCKASGYSFTTYYIHWVKQRPGQGLEWIGWFFPGSGNIKYNEKFKGKATLTADTSSSTAYMQLSSLTSEESAVYFCAGSYYSYDVLDYWGHGTTLTVSS

SEQ ID NO: 2 - protein, 107 aa, synthetic construct
DILMTQSQKFMSTSLGDRVSVSCKASQNVGINVVWHQQKPGQSPKALIYSSSHRYSGVPDRFTGSGSGTDFTLTINNVQSEDLAEYFCQQFKSYPLTFGAGTKLELK

SEQ ID NO: 3 - protein, 10 aa, synthetic construct
GYSFTTYYIH

SEQ ID NO: 4 - protein, 17 aa, synthetic construct
WFFPGSGNIKYNEKFKG

SEQ ID NO: 5 - protein, 10 aa, synthetic construct
SYYSYDVLDY

SEQ ID NO: 6 - protein, 11 aa, synthetic construct
KASQNVGINVV

SEQ ID NO: 7 - protein, 7 aa, synthetic construct
SSSHRYS

SEQ ID NO: 8 - protein, 9 aa, synthetic construct
QQFKSYPLT

SEQ ID NO: 9 - protein, 119 aa, synthetic construct
QVQLVQSGAEVKKPGSSVKVSCKASGYSFTTYYIHWVRQAPGQGLEWMGWFFPGSGNIKYNEKFKGRVTITADTSTSTAYMELSSLRSEDTAVYYCAGSYYSYDVLDYWGQGTTVTVSS

SEQ ID NO: 10 - protein, 107 aa, synthetic construct
DIQMTQSPSFLSASVGDRVTITCKASQNVGINVVWHQQKPGKAPKALIYSSSHRYSGVPSRFSGSGSGTEFTLTISSLQPEDFATYFCQQFKSYPLTFGQGTKLEIK

SEQ ID NO: 11 - protein, 107 aa, synthetic construct
DIQMTQSPSSLSASVGDRVTITCKASQNVGINVVWHQQKPGKVPKALIYSSSHRYSGVPSRFSGSGSGTDFTLTISSLQPEDVATYFCQQFKSYPLTFGQGTKLEIK

SEQ ID NO: 12 - DNA, 357 bp, synthetic construct
  source 1..357: mol_type = other DNA
caggtgcagctggttcagtctggcgccgaagtgaagaaacctggctcctccgtgaaggtgtcctgcaaggcttccggctactccttcaccacctactacatccactgggtccgacaggcccctggacaaggattggaatggatgggctggttcttccccggctccggcaacatcaagtacaacgagaagttcaagggccgcgtgaccatcaccgccgacacctctacctctaccgcctacatggaactgtccagcctgagatctgaggacaccgccgtgtactactgcgccggctcctactactcttacgacgtgctggattactggggccagggcaccacagtgacagtgtcctct

SEQ ID NO: 13 - DNA, 321 bp, synthetic construct
  source 1..321: mol_type = other DNA
gacatccagatgacccagtctccatccttcctgtccgcctctgtgggcgacagagtgaccatcacatgcaaggcctctcagaacgtgggcatcaacgtcgtgtggcaccagcagaagcctggcaaggctcctaaggctctgatctactcctccagccaccggtactctggcgtgccctctagattttccggctctggctctggcaccgagtttaccctgacaatctccagcctgcagcctgaggacttcgccacctacttttgccagcagttcaagagctaccctctgacctttggccagggcaccaagctggaaatcaag

SEQ ID NO: 14 - DNA, 321 bp, synthetic construct
  source 1..321: mol_type = other DNA
gacatccagatgacccagtctccatcctctctgtccgcctctgtgggcgacagagtgaccatcacatgcaaggcctctcagaacgtgggcatcaacgtcgtgtggcaccagcagaaacctggcaaggtgcccaaggctctgatctactcctccagccacagatactccggcgtgccctctagattctccggctctggctctggcaccgactttaccctgacaatctccagcctgcagcctgaggacgtggccacctacttttgccagcagttcaagagctaccctctgacctttggccagggcaccaagctggaaatcaag

SEQ ID NO: 15 - protein, 117 aa, synthetic construct
DVQLVESGGGLVQPGGSRKLSCAASGFTFSNFGMHWVRQAPDKGLEWVAYISSGSSTIYYADTLKGRFTISRDNPKNTLFLQMTSLRSEDTAMYYCARRGEGAMDYWGQGTSVTVSS

SEQ ID NO: 16 - protein, 106 aa, synthetic construct
ENVLTQSPAIMSASLGEKVTMSCRASSSVNYIYWYQQKSDASPKLWIYYTSNLAPGVPTRFSGSGSGNSYSLTISSMEGEDAATYYCQQFTSSPFTFGSGTKLEIK

SEQ ID NO: 17 - protein, 10 aa, synthetic construct
GFTFSNFGMH

SEQ ID NO: 18 - protein, 17 aa, synthetic construct
YISSGSSTIYYADTLKG

SEQ ID NO: 19 - protein, 8 aa, synthetic construct
RGEGAMDY

SEQ ID NO: 20 - protein, 10 aa, synthetic construct
RASSSVNYIY

SEQ ID NO: 21 - protein, 7 aa, synthetic construct
YTSNLAP

SEQ ID NO: 22 - protein, 9 aa, synthetic construct
QQFTSSPFT

SEQ ID NO: 23 - protein, 117 aa, synthetic construct
EVQLVESGGGLVQPGGSLRLSCAASGFTFSNFGMHWVRQAPGKGLEWVSYISSGSSTIYYADTLKGRFTISRDNAKNSLYLQMNSLRAEDTAVYYCARRGEGAMDYWGQGTTVTVSS

SEQ ID NO: 24 - protein, 117 aa, synthetic construct
EVQLVESGGGLVQPGGSLRLSCAASGFTFSNFGMHWVRQAPGKGLEWVSYISSGSSTIYYADTLKGRFTISRDNSKNTLYLQMNSLRAEDTAVYYCARRGEGAMDYWGQGTTVTVSS

SEQ ID NO: 25 - protein, 117 aa, synthetic construct
QVQLVESGGGVVQPGRSLRLSCAASGFTFSNFGMHWVRQAPGKGLEWVAYISSGSSTIYYADTLKGRFTISRDNSKNTLYLQMNSLRAEDTAVYYCARRGEGAMDYWGQGTTVTVSS

SEQ ID NO: 26 - protein, 106 aa, synthetic construct
DNQLTQSPSFLSASVGDRVTITCRASSSVNYIYWYQQKPGKAPKLLIYYTSNLAPGVPSRFSGSGSGNEYTLTISSLQPEDFATYYCQQFTSSPFTFGQGTKLEIK

SEQ ID NO: 27 - protein, 106 aa, synthetic construct
DNQLTQSPSSLSASVGDRVTITCRASSSVNYIYWYQQKPGKAPKLLIYYTSNLAPGVPSRFSGSGSGNDYTLTISSLQPEDFATYYCQQFTSSPFTFGQGTKLEIK

SEQ ID NO: 28 - protein, 106 aa, synthetic construct
ENVLTQSPATLSVSPGERATLSCRASSSVNYIYWYQQKPGQAPRLLIYYTSNLAPGIPARFSGSGSGNEYTLTISSLQSEDFAVYYCQQFTSSPFTFGQGTKLEIK

SEQ ID NO: 29 - protein, 105 aa, synthetic construct
QNVLTQPPSASGTPGQRVTISCRASSSVNYIYWYQQLPGTAPKLLIYYTSNLAPGVPDRFSGSGSGNSYSLAISGLRSEDEADYYCQQFTSSPFTFGTGTKVTVL

SEQ ID NO: 30 - protein, 105 aa, synthetic construct
SNELTQPPSVSVSPGQTARITCRASSSVNYIYWYQQKSGQAPVLVIYYTSNLAPGIPERFSGSGSGNMYTLTISGAQVEDEADYYCQQFTSSPFTFGTGTKVTVL

SEQ ID NO: 31 - DNA, 351 bp, synthetic construct
  source 1..351: mol_type = other DNA
gaggtgcagctggttgaatctggcggaggattggttcagcctggcggctctctgagactgtcttgtgccgcttctggcttcaccttctccaacttcggcatgcactgggtccgacaggcccctggaaaaggactggaatgggtgtcctacatctcctccggctcctccaccatctactacgctgacaccctgaagggcagattcaccatctctcgggacaacgccaagaactccctgtacctgcagatgaacagcctgagagccgaggacaccgccgtgtactactgtgctagaagaggcgagggcgccatggattattggggccagggaaccacagtgaccgtgtctagc

SEQ ID NO: 32 - DNA, 351 bp, synthetic construct
  source 1..351: mol_type = other DNA
gaggtgcagctggttgaatctggcggaggattggttcagcctggcggctctctgagactgtcttgtgccgcttctggcttcaccttctccaacttcggcatgcactgggtccgacaggcccctggaaaaggactggaatgggtgtcctacatctcctccggctcctccaccatctactacgctgacaccctgaagggcagattcaccatcagccgggacaactccaagaacaccctgtacctgcagatgaactccctgagagccgaggacaccgccgtgtactactgtgctagaagaggcgagggcgccatggattattggggccagggaaccacagtgaccgtgtctagc

SEQ ID NO: 33 - DNA, 351 bp, synthetic construct
  source 1..351: mol_type = other DNA
caggtgcagctggtggaatctggtggcggagttgtgcagcctggcagatccctgagactgtcttgtgccgcctctggcttcaccttctccaacttcggcatgcactgggtccgacaggcccctggaaaaggattggagtgggtcgcctacatctcctccggctcctccaccatctactacgctgacaccctgaagggcagattcaccatcagccgggacaactccaagaacaccctgtacctgcagatgaactccctgagagccgaggacaccgccgtgtactactgtgctagaagaggcgagggcgccatggattattggggccagggaaccacagtgaccgtgtctagc

SEQ ID NO: 34 - DNA, 318 bp, synthetic construct
  source 1..318: mol_type = other DNA
gataaccagctgacccagtctcctagcttcctgtctgcctctgtgggcgacagagtgacaattacctgccgggcctcctcctccgtgaactacatctactggtatcagcagaagcccggcaaggcccctaagctgctgatctactacacctccaatctggcccctggcgtgccctctagattttccggatctggctccggcaacgagtataccctgacaatctccagcctgcagcctgaggacttcgccacctactactgccagcagttcacctcctctccattcacctttggccagggcaccaagctggaaatcaaa

SEQ ID NO: 35 - DNA, 317 bp, synthetic construct
  source 1..317: mol_type = other DNA
ataaccagctgacccagtctccttccagcctgtctgcttctgtgggcgacagagtgacaattacctgccgggcctcctcctccgtgaactacatctactggtatcagcagaagcccggcaaggcccctaagctgctgatctactacacctccaatctggcccctggcgtgccctctagattttccggatctggctccggcaacgactataccctgacaatctccagcctgcagcctgaggacttcgccacctactactgccagcagttcacctcctctccattcacctttggccagggcaccaagctggaaatcaaa

SEQ ID NO: 36 - DNA, 318 bp, synthetic construct
  source 1..318: mol_type = other DNA
gagaatgtgctgacccagtctcctgccacactgtctgttagccctggcgagagagctaccctgagctgcagagcctcttcctccgtgaactacatctactggtatcagcagaagcccggccaggctcctagactgctgatctactacacctccaatctggcccctggcatccctgccagattttccggatctggctccggcaacgagtataccctgaccatctccagcctgcagtccgaggactttgctgtgtactattgccagcagttcacaagcagccctttcacctttggccagggcaccaagctggaaatcaaa

SEQ ID NO: 37 - DNA, 315 bp, synthetic construct
  source 1..315: mol_type = other DNA
cagaatgtgctgacccaacctccttccgcctctggcacacctggacagagagtgacaatctcctgccgggcctcctcctccgtgaactacatctactggtatcagcagctgcccggcaccgctcctaaactgctgatctactacacctccaatctggcccctggcgtgcccgatagattttccggatctggctccggcaactcctacagcctggctatctctggcctgagatctgaggacgaggccgactactactgccagcagttcacctcctctccattcacctttggcaccggcaccaaagtgacagttctt

SEQ ID NO: 38 - DNA, 315 bp, synthetic construct
  source 1..315: mol_type = other DNA
tctaatgagctgacccagcctccttccgtgtccgtgtctcctggacagaccgccagaattacctgccgggcctcctcctccgtgaactacatctactggtatcagcagaagtccggccaggctcctgtgctcgtgatctactacacctccaatctggcccctggcatccctgagagattctccggatctggctccggcaacatgtacaccctgaccatctctggcgcccaggtggaagatgaggccgactactactgccagcagttcacctcctctccattcacctttggcaccggcaccaaagtgacagttctt

SEQ ID NO: 39 - protein, 107 aa, Homo sapiens [sequence omitted]

SEQ ID NO: 40 - protein, 326 aa, synthetic construct
ASTKGPSVFPLAPCSRSTSESTAALGCLVKDYFPEPVTVSWNSGALTSGVHTFPAVLQSSGLYSLSSVVTVPSSSLGTKTYTCNVDHKPSNTKVDKRVESKYGPPCPPCPAPEFLGGPSVFLFPPKPKDTLMISRTPEVTCVVVDVSQEDPEVQFNWYVDGVEVHNAKTKPREEQFNSTYRVVSVLTVLHQDWLNGKEYKCKVSNKGLPSSIEKTISKAKGQPREPQVYTLPPSQEEMTKNQVSLTCLVKGFYPSDIAVEWESNGQPENNYKTTPPVLDSDGSFFLYSRLTVDKSRWQEGNVFSCSVMHEALHNHYTQKSLSLSLG

SEQ ID NO: 41 - protein, 330 aa, Homo sapiens
ASTKGPSVFPLAPSSKSTSGGTAALGCLVKDYFPEPVTVSWNSGALTSGVHTFPAVLQSSGLYSLSSVVTVPSSSLGTQTYICNVNHKPSNTKVDKRVEPKSCDKTHTCPPCPAPELLGGPSVFLFPPKPKDTLMISRTPEVTCVVVDVSHEDPEVKFNWYVDGVEVHNAKTKPREEQYNSTYRVVSVLTVLHQDWLNGKEYKCKVSNKALPAPIEKTISKAKGQPREPQVYTLPPSREEMTKNQVSLTCLVKGFYPSDIAVEWESNGQPENNYKTTPPVLDSDGSFFLYSKLTVDKSRWQQGNVFSCSVMHEALHNHYTQKSLSLSPGK

SEQ ID NO: 42 - protein, 330 aa, synthetic construct
ASTKGPSVFPLAPSSKSTSGGTAALGCLVKDYFPEPVTVSWNSGALTSGVHTFPAVLQSSGLYSLSSVVTVPSSSLGTQTYICNVNHKPSNTKVDKRVEPKSCDKTHTCPPCPAPELLGGPSVFLFPPKPKDTLMISRTPEVTCVVVDVSHEDPEVKFNWYVDGVEVHNAKTKPREEQYASTYRVVSVLTVLHQDWLNGKEYKCKVSNKALPAPIEKTISKAKGQPREPQVYTLPPSREEMTKNQVSLTCLVKGFYPSDIAVEWESNGQPENNYKTTPPVLDSDGSFFLYSKLTVDKSRWQQGNVFSCSVMHEALHNHYTQKSLSLSPGK

SEQ ID NO: 43 - DNA, 344 bp, synthetic construct
  source 1..344: mol_type = other DNA
atgagcatcggcctcctgtgctgtgcagccttgtctctcctgtgggcaggtccagtgaatgctggtgtcactcagaccccaaaattccaggtcctgaagacaggacagagcatgacactgcagtgtgcccaggatatgaaccatgaatacatgtcctggtatcgacaagacccaggcatggggctgaggctgattcattactcagttggtgctggtatcactgaccaaggagaagtccccaatggctacaatgtctccagatcaaccacagaggatttcccgctcaggctgctgtcggctgctccctcccagacatctgtgtacttctgtgccagcagttactc

SEQ ID NO: 44 - protein, 114 aa, synthetic construct
MSIGLLCCAALSLLWAGPVNAGVTQTPKFQVLKTGQSMTLQCAQDMNHEYMSWYRQDPGMGLRLIHYSVGAGITDQGEVPNGYNVSRSTTEDFPLRLLSAAPSQTSVYFCASSY

SEQ ID NO: 45 - protein, 5 aa, synthetic construct
TYYIH

SEQ ID NO: 46 - protein, 17 aa, synthetic construct
WFFPGSGNIKYNEKFKG

SEQ ID NO: 47 - protein, 10 aa, synthetic construct
SYYSYDVLDY

SEQ ID NO: 48 - protein, 7 aa, synthetic construct
GYSFTTY

SEQ ID NO: 49 - protein, 6 aa, synthetic construct
FPGSGN

SEQ ID NO: 50 - protein, 10 aa, synthetic construct
SYYSYDVLDY

SEQ ID NO: 51 - protein, 11 aa, synthetic construct
KASQNVGINVV

SEQ ID NO: 52 - protein, 7 aa, synthetic construct
SSSHRYS

SEQ ID NO: 53 - protein, 9 aa, synthetic construct
QQFKSYPLT

SEQ ID NO: 54 - protein, 11 aa, synthetic construct
KASQNVGINVV

SEQ ID NO: 55 - protein, 7 aa, synthetic construct
SSSHRYS

SEQ ID NO: 56 - protein, 9 aa, synthetic construct
QQFKSYPLT

SEQ ID NO: 57 - protein, 5 aa, synthetic construct
NFGMH

SEQ ID NO: 58 - protein, 17 aa, synthetic construct
YISSGSSTIYYADTLKG

SEQ ID NO: 59 - protein, 8 aa, synthetic construct
RGEGAMDY

SEQ ID NO: 60 - protein, 7 aa, synthetic construct
GFTFSNF

SEQ ID NO: 61 - protein, 6 aa, synthetic construct
SSGSST

SEQ ID NO: 62 - protein, 8 aa, synthetic construct
RGEGAMDY

SEQ ID NO: 63 - protein, 10 aa, synthetic construct
RASSSVNYIY

SEQ ID NO: 64 - protein, 7 aa, synthetic construct
YTSNLAP

SEQ ID NO: 65 - protein, 9 aa, synthetic construct
QQFTSSPFT

SEQ ID NO: 66 - protein, 10 aa, synthetic construct
RASSSVNYIY

SEQ ID NO: 67 - protein, 7 aa, synthetic construct
YTSNLAP

SEQ ID NO: 68 - protein, 9 aa, synthetic construct
QQFTSSPFT

SEQ ID NO: 69-74 - skipped (6 entries)

SEQ ID NO: 75 - protein, 14 aa, synthetic construct
AEAAAKEAAAKAAA

SEQ ID NO: 76 - protein, 19 aa, synthetic construct
AEAAAKEAAAKEAAAKAAA

SEQ ID NO: 77 - protein, 24 aa, synthetic construct
AEAAAKEAAAKEAAAKEAAAKAAA

SEQ ID NO: 78 - protein, 29 aa, synthetic construct
AEAAAKEAAAKEAAAKEAAAKEAAAKAAA

SEQ ID NO: 79-91 - skipped (13 entries)

SEQ ID NO: 92 - protein, 390 aa, Homo sapiens
MPPSGLRLLLLLLPLLWLLVLTPGRPAAGLSTCKTIDMELVKRKRIEAIRGQILSKLRLASPPSQGEVPPGPLPEAVLALYNSTRDRVAGESAEPEPEPEADYYAKEVTRVLMVETHNEIYDKFKQSTHSIYMFFNTSELREAVPEPVLLSRAELRLLRLKLKVEQHVELYQKYSNNSWRYLSNRLLAPSDSPEWLSFDVTGVVRQWLSRGGEIEGFRLSAHCSCDSRDNTLQVDINGFTTGRRGDLATIHGMNRPFLLLMATPLERAQHLQSSRHRRALDTNYCFSSTEKNCCVRQLYIDFRKDLGWKWIHEPKGYHANFCLGPCPYIWSLDTQYSKVLALYNQHNPGASAAPCCVPQALEPLPIVYYVGRKPKVEQLSNMIVRSCKCS

SEQ ID NO: 93 - protein, 414 aa, Homo sapiens
MHYCVLSAFLILHLVTVALSLSTCSTLDMDQFMRKRIEAIRGQILSKLKLTSPPEDYPEPEEVPPEVISIYNSTRDLLQEKASRRAAACERERSDEEYYAKEVYKIDMPPFFPSENAIPPTFYRPYFRIVRFDVSAMEKNASNLVKAEFRVFRLQNPKARVPEQRIELYQILKSKDLTSPTQRYIDSKVVKTRAEGEWLSFDVTDAVHEWLHHKDRNLGFKISLHCPCCTFVPSNNYIIPNKSEELEARFAGIDGTSTYTSGDQKTIKSTRKKNSGKTPHLLLMLLPSYRLESQQTNRRKKRALDAAYCFRNVQDNCCLRPLYIDFKRDLGWKWIHEPKGYNANFCAGACPYLWSSDTQHSRVLSLYNTINPEASASPCCVSQDLEPLTILYYIGKTPKIEQLSNMIVKSCKCS

SEQ ID NO: 94 - protein, 412 aa, Homo sapiens
MKMHLQRALVVLALLNFATVSLSLSTCTTLDFGHIKKKRVEAIRGQILSKLRLTSPPEPTVMTHVPYQVLALYNSTRELLEEMHGEREEGCTQENTESEYYAKEIHKFDMIQGLAEHNELAVCPKGITSKVFRFNVSSVEKNRTNLFRAEFRVLRVPNPSSKRNEQRIELFQILRPDEHIAKQRYIGGKNLPTRGTAEWLSFDVTDTVREWLLRRESNLGLEISIHCPCHTFQPNGDILENIHEVMEIKFKGVDNEDDHGRGDLGRLKKQKDHHNPHLILMMIPPHRLDNPGQGGQRKKRALDTNYCFRNLEENCCVRPLYIDFRQDLGWKWVHEPKGYYANFCSGPCPYLRSADTTHSTVLGLYNTLNPEASASPCCVPQDLEPLTILYYVGRTPKVEQLSNMVVKSCKCS

SEQ ID NO: 95 - protein, 503 aa, Homo sapiens
MEAAVAAPRPRLLLLVLAAAAAAAAALLPGATALQCFCHLCTKDNFTCVTDGLCFVSVTETTDKVIHNSMCIAEIDLIPRDRPFVCAPSSKTGSVTTTYCCNQDHCNKIELPTTVKSSPGLGPVELAAVIAGPVCFVCISLMLMVYICHNRTVIHHRVPNEEDPSLDRPFISEGTTLKDLIYDMTTSGSGSGLPLLVQRTIARTIVLQESIGKGRFGEVWRGKWRGEEVAVKIFSSREERSWFREAEIYQTVMLRHENILGFIAADNKDNGTWTQLWLVSDYHEHGSLFDYLNRYTVTVEGMIKLALSTASGLAHLHMEIVGTQGKPAIAHRDLKSKNILVKKNGTCCIADLGLAVRHDSATDTIDIAPNHRVGTKRYMAPEVLDDSINMKHFESFKRADIYAMGLVFWEIARRCSIGGIHEDYQLPYYDLVPSDPSVEEMRKVVCEQKLRPNIPNRWQSCEALRVMAKIMRECWYANGAARLTALRIKKTLSQLSQQEGIKM

SEQ ID NO: 96 - protein, 507 aa, Homo sapiens
MEAAVAAPRPRLLLLVLAAAAAAAAALLPGATALQCFCHLCTKDNFTCVTDGLCFVSVTETTDKVIHNSMCIAEIDLIPRDRPFVCAPSSKTGSVTTTYCCNQDHCNKIELPTTGPFSVKSSPGLGPVELAAVIAGPVCFVCISLMLMVYICHNRTVIHHRVPNEEDPSLDRPFISEGTTLKDLIYDMTTSGSGSGLPLLVQRTIARTIVLQESIGKGRFGEVWRGKWRGEEVAVKIFSSREERSWFREAEIYQTVMLRHENILGFIAADNKDNGTWTQLWLVSDYHEHGSLFDYLNRYTVTVEGMIKLALSTASGLAHLHMEIVGTQGKPAIAHRDLKSKNILVKKNGTCCIADLGLAVRHDSATDTIDIAPNHRVGTKRYMAPEVLDDSINMKHFESFKRADIYAMGLVFWEIARRCSIGGIHEDYQLPYYDLVPSDPSVEEMRKVVCEQKLRPNIPNRWQSCEALRVMAKIMRECWYANGAARLTALRIKKTLSQLSQQEGIKM

SEQ ID NO: 97 - protein, 426 aa, Homo sapiens
MEAAVAAPRPRLLLLVLAAAAAAAAALLPGATALQCFCHLCTKDNFTCVTDGLCFVSVTETTDKVIHNSMCIAEIDLIPRDRPFVCAPSSKTGSVTTTYCCNQDHCNKIELPTTGLPLLVQRTIARTIVLQESIGKGRFGEVWRGKWRGEEVAVKIFSSREERSWFREAEIYQTVMLRHENILGFIAADNKDNGTWTQLWLVSDYHEHGSLFDYLNRYTVTVEGMIKLALSTASGLAHLHMEIVGTQGKPAIAHRDLKSKNILVKKNGTCCIADLGLAVRHDSATDTIDIAPNHRVGTKRYMAPEVLDDSINMKHFESFKRADIYAMGLVFWEIARRCSIGGIHEDYQLPYYDLVPSDPSVEEMRKVVCEQKLRPNIPNRWQSCEALRVMAKIMRECWYANGAARLTALRIKKTLSQLSQQEGIKM

SEQ ID NO: 98 - protein, 567 aa, Homo sapiens
MGRGLLRGLWPLHIVLWTRIASTIPPHVQKSVNNDMIVTDNNGAVKFPQLCKFCDVRFSTCDNQKSCMSNCSITSICEKPQEVCVAVWRKNDENITLETVCHDPKLPYHDFILEDAASPKCIMKEKKKPGETFFMCSCSSDECNDNIIFSEEYNTSNPDLLLVIFQVTGISLLPPLGVAISVIIIFYCYRVNRQQKLSSTWETGKTRKLMEFSEHCAIILEDDRSDISSTCANNINHNTELLPIELDTLVGKGRFAEVYKAKLKQNTSEQFETVAVKIFPYEEYASWKTEKDIFSDINLKHENILQFLTAEERKTELGKQYWLITAFHAKGNLQEYLTRHVISWEDLRKLGSSLARGIAHLHSDHTPCGRPKMPIVHRDLKSSNILVKNDLTCCLCDFGLSLRLDPTLSVDDLANSGQVGTARYMAPEVLESRMNLENVESFKQTDVYSMALVLWEMTSRCNAVGEVKDYEPPFGSKVREHPCVESMKDNVLRDRGRPEIPSFWLNHQGIQMVCETLTECWDHDPEARLTAQCVAERFSELEHLDRLSGRSCSEEKIPEDGSLNTTK

SEQ ID NO: 99 - protein, 592 aa, Homo sapiens
MGRGLLRGLWPLHIVLWTRIASTIPPHVQKSDVEMEAQKDEIICPSCNRTAHPLRHINNDMIVTDNNGAVKFPQLCKFCDVRFSTCDNQKSCMSNCSITSICEKPQEVCVAVWRKNDENITLETVCHDPKLPYHDFILEDAASPKCIMKEKKKPGETFFMCSCSSDECNDNIIFSEEYNTSNPDLLLVIFQVTGISLLPPLGVAISVIIIFYCYRVNRQQKLSSTWETGKTRKLMEFSEHCAIILEDDRSDISSTCANNINHNTELLPIELDTLVGKGRFAEVYKAKLKQNTSEQFETVAVKIFPYEEYASWKTEKDIFSDINLKHENILQFLTAEERKTELGKQYWLITAFHAKGNLQEYLTRHVISWEDLRKLGSSLARGIAHLHSDHTPCGRPKMPIVHRDLKSSNILVKNDLTCCLCDFGLSLRLDPTLSVDDLANSGQVGTARYMAPEVLESRMNLENVESFKQTDVYSMALVLWEMTSRCNAVGEVKDYEPPFGSKVREHPCVESMKDNVLRDRGRPEIPSFWLNHQGIQMVCETLTECWDHDPEARLTAQCVAERFSELEHLDRLSGRSCSEEKIPEDGSLNTTK

SEQ ID NO: 100 - protein, 137 aa, Homo sapiens
TIPPHVQKSVNNDMIVTDNNGAVKFPQLCKFCDVRFSTCDNQKSCMSNCSITSICEKPQEVCVAVWRKNDENITLETVCHDPKLPYHDFILEDAASPKCIMKEKKKPGETFFMCSCSSDECNDNIIFSEEYNTSNPD

SEQ ID NO: 101 - protein, 136 aa, Homo sapiens
IPPHVQKSVNNDMIVTDNNGAVKFPQLCKFCDVRFSTCDNQKSCMSNCSITSICEKPQEVCVAVWRKNDENITLETVCHDPKLPYHDFILEDAASPKCIMKEKKKPGETFFMCSCSSDECNDNIIFSEEYNTSNPD

SEQ ID NO: 102 - protein, 162 aa, Homo sapiens
TIPPHVQKSDVEMEAQKDEIICPSCNRTAHPLRHINNDMIVTDNNGAVKFPQLCKFCDVRFSTCDNQKSCMSNCSITSICEKPQEVCVAVWRKNDENITLETVCHDPKLPYHDFILEDAASPKCIMKEKKKPGETFFMCSCSSDECNDNIIFSEEYNTSNPD

SEQ ID NO: 103 - protein, 101 aa, Homo sapiens
QLCKFCDVRFSTCDNQKSCMSNCSITSICEKPQEVCVAVWRKNDENITLETVCHDPKLPYHDFILEDAASPKCIMKEKKKPGETFFMCSCSSDECNDNIIF

SEQ ID NO: 104 - protein, 93 aa, Homo sapiens
LQCFCHLCTKDNFTCVTDGLCFVSVTETTDKVIHNSMCIAEIDLIPRDRPFVCAPSSKTGSVTTTYCCNQDHCNKIELPTTVKSSPGLGPVEL

SEQ ID NO: 105 - protein, 79 aa, Homo sapiens
ALQCFCHLCTKDNFTCVTDGLCFVSVTETTDKVIHNSMCIAEIDLIPRDRPFVCAPSSKTGSVTTTYCCNQDHCNKIEL

SEQ ID NO: 106 - protein, 851 aa, Homo sapiens
MTSHYVIAIFALMSSCLATAGPEPGALCELSPVSASHPVQALMESFTVLSGCASRGTTGLPQEVHVLNLRTAGQGPGQLQREVTLHLNPISSVHIHHKSVVFLLNSPHPLVWHLKTERLATGVSRLFLVSEGSVVQFSSANFSLTAETEERNFPHGNEHLLNWARKEYGAVTSFTELKIARNIYIKVGEDQVFPPKCNIGKNFLSLNYLAEYLQPKAAEGCVMSSQPQNEEVHIIELITPNSNPYSAFQVDITIDIRPSQEDLEVVKNLILILKCKKSVNWVIKSFDVKGSLKIIAPNSIGFGKESERSMTMTKSIRDDIPSTQGNLVKWALDNGYSPITSYTMAPVANRFHLRLENNAEEMGDEEVHTIPPELRILLDPGALPALQNPPIRGGEGQNGGLPFPFPDISRRVWNEEGEDGLPRPKDPVIPSIQLFPGLREPEEVQGSVDIALSVKCDNEKMIVAVEKDSFQASGYSGMDVTLLDPTCKAKMNGTHFVLESPLNGCGTRPRWSALDGVVYYNSIVIQVPALGDSSGWPDGYEDLESGDNGFPGDMDEGDASLFTRPEIVVFNCSLQQVRNPSSFQEQPHGNITFNMELYNTDLFLVPSQGVFSVPENGHVYVEVSVTKAEQELGFAIQTCFISPYSNPDRMSHYTIIENICPKDESVKFYSPKRVHFPIPQADMDKKRFSFVFKPVFNTSLLFLQCELTLCTKMEKHPQKLPKCVPPDEACTSLDASIIWAMMQNKKTFTKPLAVIHHEAESKEKGPSMKEPNPISPPIFHGLDTLTVMGIAFAAFVIGALLTGALWYIYSHTGETAGRQQVPTSPPASENSSAAHSIGSTQSTPCSSSSTA

SEQ ID NO: 107 - protein, 850 aa, Homo sapiens
MTSHYVIAIFALMSSCLATAGPEPGALCELSPVSASHPVQALMESFTVLSGCASRGTTGLPQEVHVLNLRTAGQGPGQLQREVTLHLNPISSVHIHHKSVVFLLNSPHPLVWHLKTERLATGVSRLFLVSEGSVVQFSSANFSLTAETEERNFPHGNEHLLNWARKEYGAVTSFTELKIARNIYIKVGEDQVFPPKCNIGKNFLSLNYLAEYLQPKAAEGCVMSSQPQNEEVHIIELITPNSNPYSAFQVDITIDIRPSQEDLEVVKNLILILKCKKSVNWVIKSFDVKGSLKIIAPNSIGFGKESERSMTMTKSIRDDIPSTQGNLVKWALDNGYSPITSYTMAPVANRFHLRLENNEEMGDEEVHTIPPELRILLDPGALPALQNPPIRGGEGQNGGLPFPFPDISRRVWNEEGEDGLPRPKDPVIPSIQLFPGLREPEEVQGSVDIALSVKCDNEKMIVAVEKDSFQASGYSGMDVTLLDPTCKAKMNGTHFVLESPLNGCGTRPRWSALDGVVYYNSIVIQVPALGDSSGWPDGYEDLESGDNGFPGDMDEGDASLFTRPEIVVFNCSLQQVRNPSSFQEQPHGNITFNMELYNTDLFLVPSQGVFSVPENGHVYVEVSVTKAEQELGFAIQTCFISPYSNPDRMSHYTIIENICPKDESVKFYSPKRVHFPIPQADMDKKRFSFVFKPVFNTSLLFLQCELTLCTKMEKHPQKLPKCVPPDEACTSLDASIIWAMMQNKKTFTKPLAVIHHEAESKEKGPSMKEPNPISPPIFHGLDTLTVMGIAFAAFVIGALLTGALWYIYSHTGETAGRQQVPTSPPASENSSAAHSIGSTQSTPCSSSSTA

SEQ ID NO: 108 - protein, 767 aa, Homo sapiens
GPEPGALCELSPVSASHPVQALMESFTVLSGCASRGTTGLPQEVHVLNLRTAGQGPGQLQREVTLHLNPISSVHIHHKSVVFLLNSPHPLVWHLKTERLATGVSRLFLVSEGSVVQFSSANFSLTAETEERNFPHGNEHLLNWARKEYGAVTSFTELKIARNIYIKVGEDQVFPPKCNIGKNFLSLNYLAEYLQPKAAEGCVMSSQPQNEEVHIIELITPNSNPYSAFQVDITIDIRPSQEDLEVVKNLILILKCKKSVNWVIKSFDVKGSLKIIAPNSIGFGKESERSMTMTKSIRDDIPSTQGNLVKWALDNGYSPITSYTMAPVANRFHLRLENNAEEMGDEEVHTIPPELRILLDPGALPALQNPPIRGGEGQNGGLPFPFPDISRRVWNEEGEDGLPRPKDPVIPSIQLFPGLREPEEVQGSVDIALSVKCDNEKMIVAVEKDSFQASGYSGMDVTLLDPTCKAKMNGTHFVLESPLNGCGTRPRWSALDGVVYYNSIVIQVPALGDSSGWPDGYEDLESGDNGFPGDMDEGDASLFTRPEIVVFNCSLQQVRNPSSFQEQPHGNITFNMELYNTDLFLVPSQGVFSVPENGHVYVEVSVTKAEQELGFAIQTCFISPYSNPDRMSHYTIIENICPKDESVKFYSPKRVHFPIPQADMDKKRFSFVFKPVFNTSLLFLQCELTLCTKMEKHPQKLPKCVPPDEACTSLDASIIWAMMQNKKTFTKPLAVIHHEAESKEKGPSMKEPNPISPPIFHGLDTLTV

SEQ ID NO: 109-116 - skipped (8 entries)

SEQ ID NO: 117 - protein, 361 aa, Homo sapiens
LSTCKTIDMELVKRKRIEAIRGQILSKLRLASPPSQGEVPPGPLPEAVLALYNSTRDRVAGESAEPEPEPEADYYAKEVTRVLMVETHNEIYDKFKQSTHSIYMFFNTSELREAVPEPVLLSRAELRLLRLKLKVEQHVELYQKYSNNSWRYLSNRLLAPSDSPEWLSFDVTGVVRQWLSRGGEIEGFRLSAHCSCDSRDNTLQVDINGFTTGRRGDLATIHGMNRPFLLLMATPLERAQHLQSSRHRRALDTNYCFSSTEKNCCVRQLYIDFRKDLGWKWIHEPKGYHANFCLGPCPYIWSLDTQYSKVLALYNQHNPGASAAPCCVPQALEPLPIVYYVGRKPKVEQLSNMIVRSCKCS

SEQ ID NO: 118 - protein, 394 aa, Homo sapiens
LSTCSTLDMDQFMRKRIEAIRGQILSKLKLTSPPEDYPEPEEVPPEVISIYNSTRDLLQEKASRRAAACERERSDEEYYAKEVYKIDMPPFFPSENAIPPTFYRPYFRIVRFDVSAMEKNASNLVKAEFRVFRLQNPKARVPEQRIELYQILKSKDLTSPTQRYIDSKVVKTRAEGEWLSFDVTDAVHEWLHHKDRNLGFKISLHCPCCTFVPSNNYIIPNKSEELEARFAGIDGTSTYTSGDQKTIKSTRKKNSGKTPHLLLMLLPSYRLESQQTNRRKKRALDAAYCFRNVQDNCCLRPLYIDFKRDLGWKWIHEPKGYNANFCAGACPYLWSSDTQHSRVLSLYNTINPEASASPCCVSQDLEPLTILYYIGKTPKIEQLSNMIVKSCKCS

SEQ ID NO: 119 - protein, 389 aa, Homo sapiens
LSTCTTLDFGHIKKKRVEAIRGQILSKLRLTSPPEPTVMTHVPYQVLALYNSTRELLEEMHGEREEGCTQENTESEYYAKEIHKFDMIQGLAEHNELAVCPKGITSKVFRFNVSSVEKNRTNLFRAEFRVLRVPNPSSKRNEQRIELFQILRPDEHIAKQRYIGGKNLPTRGTAEWLSFDVTDTVREWLLRRESNLGLEISIHCPCHTFQPNGDILENIHEVMEIKFKGVDNEDDHGRGDLGRLKKQKDHHNPHLILMMIPPHRLDNPGQGGQRKKRALDTNYCFRNLEENCCVRPLYIDFRQDLGWKWVHEPKGYYANFCSGPCPYLRSADTTHSTVLGLYNTLNPEASASPCCVPQDLEPLTILYYVGRTPKVEQLSNMVVKSCKCS

SEQ ID NO: 120 - protein, 470 aa, Homo sapiens
LQCFCHLCTKDNFTCVTDGLCFVSVTETTDKVIHNSMCIAEIDLIPRDRPFVCAPSSKTGSVTTTYCCNQDHCNKIELPTTVKSSPGLGPVELAAVIAGPVCFVCISLMLMVYICHNRTVIHHRVPNEEDPSLDRPFISEGTTLKDLIYDMTTSGSGSGLPLLVQRTIARTIVLQESIGKGRFGEVWRGKWRGEEVAVKIFSSREERSWFREAEIYQTVMLRHENILGFIAADNKDNGTWTQLWLVSDYHEHGSLFDYLNRYTVTVEGMIKLALSTASGLAHLHMEIVGTQGKPAIAHRDLKSKNILVKKNGTCCIADLGLAVRHDSATDTIDIAPNHRVGTKRYMAPEVLDDSINMKHFESFKRADIYAMGLVFWEIARRCSIGGIHEDYQLPYYDLVPSDPSVEEMRKVVCEQKLRPNIPNRWQSCEALRVMAKIMRECWYANGAARLTALRIKKTLSQLSQQEGIKM

SEQ ID NO: 121 - protein, 474 aa, Homo sapiens
LQCFCHLCTKDNFTCVTDGLCFVSVTETTDKVIHNSMCIAEIDLIPRDRPFVCAPSSKTGSVTTTYCCNQDHCNKIELPTTGPFSVKSSPGLGPVELAAVIAGPVCFVCISLMLMVYICHNRTVIHHRVPNEEDPSLDRPFISEGTTLKDLIYDMTTSGSGSGLPLLVQRTIARTIVLQESIGKGRFGEVWRGKWRGEEVAVKIFSSREERSWFREAEIYQTVMLRHENILGFIAADNKDNGTWTQLWLVSDYHEHGSLFDYLNRYTVTVEGMIKLALSTASGLAHLHMEIVGTQGKPAIAHRDLKSKNILVKKNGTCCIADLGLAVRHDSATDTIDIAPNHRVGTKRYMAPEVLDDSINMKHFESFKRADIYAMGLVFWEIARRCSIGGIHEDYQLPYYDLVPSDPSVEEMRKVVCEQKLRPNIPNRWQSCEALRVMAKIMRECWYANGAARLTALRIKKTLSQLSQQEGIKM

SEQ ID NO: 122 - protein, 393 aa, Homo sapiens
LQCFCHLCTKDNFTCVTDGLCFVSVTETTDKVIHNSMCIAEIDLIPRDRPFVCAPSSKTGSVTTTYCCNQDHCNKIELPTTGLPLLVQRTIARTIVLQESIGKGRFGEVWRGKWRGEEVAVKIFSSREERSWFREAEIYQTVMLRHENILGFIAADNKDNGTWTQLWLVSDYHEHGSLFDYLNRYTVTVEGMIKLALSTASGLAHLHMEIVGTQGKPAIAHRDLKSKNILVKKNGTCCIADLGLAVRHDSATDTIDIAPNHRVGTKRYMAPEVLDDSINMKHFESFKRADIYAMGLVFWEIARRCSIGGIHEDYQLPYYDLVPSDPSVEEMRKVVCEQKLRPNIPNRWQSCEALRVMAKIMRECWYANGAARLTALRIKKTLSQLSQQEGIKM

SEQ ID NO: 123 - protein, 545 aa, Homo sapiens
TIPPHVQKSVNNDMIVTDNNGAVKFPQLCKFCDVRFSTCDNQKSCMSNCSITSICEKPQEVCVAVWRKNDENITLETVCHDPKLPYHDFILEDAASPKCIMKEKKKPGETFFMCSCSSDECNDNIIFSEEYNTSNPDLLLVIFQVTGISLLPPLGVAISVIIIFYCYRVNRQQKLSSTWETGKTRKLMEFSEHCAIILEDDRSDISSTCANNINHNTELLPIELDTLVGKGRFAEVYKAKLKQNTSEQFETVAVKIFPYEEYASWKTEKDIFSDINLKHENILQFLTAEERKTELGKQYWLITAFHAKGNLQEYLTRHVISWEDLRKLGSSLARGIAHLHSDHTPCGRPKMPIVHRDLKSSNILVKNDLTCCLCDFGLSLRLDPTLSVDDLANSGQVGTARYMAPEVLESRMNLENVESFKQTDVYSMALVLWEMTSRCNAVGEVKDYEPPFGSKVREHPCVESMKDNVLRDRGRPEIPSFWLNHQGIQMVCETLTECWDHDPEARLTAQCVAERFSELEHLDRLSGRSCSEEKIPEDGSLNTTK

SEQ ID NO: 124 - protein, 570 aa, Homo sapiens
TIPPHVQKSDVEMEAQKDEIICPSCNRTAHPLRHINNDMIVTDNNGAVKFPQLCKFCDVRFSTCDNQKSCMSNCSITSICEKPQEVCVAVWRKNDENITLETVCHDPKLPYHDFILEDAASPKCIMKEKKKPGETFFMCSCSSDECNDNIIFSEEYNTSNPDLLLVIFQVTGISLLPPLGVAISVIIIFYCYRVNRQQKLSSTWETGKTRKLMEFSEHCAIILEDDRSDISSTCANNINHNTELLPIELDTLVGKGRFAEVYKAKLKQNTSEQFETVAVKIFPYEEYASWKTEKDIFSDINLKHENILQFLTAEERKTELGKQYWLITAFHAKGNLQEYLTRHVISWEDLRKLGSSLARGIAHLHSDHTPCGRPKMPIVHRDLKSSNILVKNDLTCCLCDFGLSLRLDPTLSVDDLANSGQVGTARYMAPEVLESRMNLENVESFKQTDVYSMALVLWEMTSRCNAVGEVKDYEPPFGSKVREHPCVESMKDNVLRDRGRPEIPSFWLNHQGIQMVCETLTECWDHDPEARLTAQCVAERFSELEHLDRLSGRSCSEEKIPEDGSLNTTK

SEQ ID NO: 125 - protein, 831 aa, Homo sapiens
GPEPGALCELSPVSASHPVQALMESFTVLSGCASRGTTGLPQEVHVLNLRTAGQGPGQLQREVTLHLNPISSVHIHHKSVVFLLNSPHPLVWHLKTERLATGVSRLFLVSEGSVVQFSSANFSLTAETEERNFPHGNEHLLNWARKEYGAVTSFTELKIARNIYIKVGEDQVFPPKCNIGKNFLSLNYLAEYLQPKAAEGCVMSSQPQNEEVHIIELITPNSNPYSAFQVDITIDIRPSQEDLEVVKNLILILKCKKSVNWVIKSFDVKGSLKIIAPNSIGFGKESERSMTMTKSIRDDIPSTQGNLVKWALDNGYSPITSYTMAPVANRFHLRLENNAEEMGDEEVHTIPPELRILLDPGALPALQNPPIRGGEGQNGGLPFPFPDISRRVWNEEGEDGLPRPKDPVIPSIQLFPGLREPEEVQGSVDIALSVKCDNEKMIVAVEKDSFQASGYSGMDVTLLDPTCKAKMNGTHFVLESPLNGCGTRPRWSALDGVVYYNSIVIQVPALGDSSGWPDGYEDLESGDNGFPGDMDEGDASLFTRPEIVVFNCSLQQVRNPSSFQEQPHGNITFNMELYNTDLFLVPSQGVFSVPENGHVYVEVSVTKAEQELGFAIQTCFISPYSNPDRMSHYTIIENICPKDESVKFYSPKRVHFPIPQADMDKKRFSFVFKPVFNTSLLFLQCELTLCTKMEKHPQKLPKCVPPDEACTSLDASIIWAMMQNKKTFTKPLAVIHHEAESKEKGPSMKEPNPISPPIFHGLDTLTVMGIAFAAFVIGALLTGALWYIYSHTGETAGRQQVPTSPPASENSSAAHSIGSTQSTPCSSSSTA

SEQ ID NO: 126 - protein, 830 aa, Homo sapiens
GPEPGALCELSPVSASHPVQALMESFTVLSGCASRGTTGLPQEVHVLNLRTAGQGPGQLQREVTLHLNPISSVHIHHKSVVFLLNSPHPLVWHLKTERLATGVSRLFLVSEGSVVQFSSANFSLTAETEERNFPHGNEHLLNWARKEYGAVTSFTELKIARNIYIKVGEDQVFPPKCNIGKNFLSLNYLAEYLQPKAAEGCVMSSQPQNEEVHIIELITPNSNPYSAFQVDITIDIRPSQEDLEVVKNLILILKCKKSVNWVIKSFDVKGSLKIIAPNSIGFGKESERSMTMTKSIRDDIPSTQGNLVKWALDNGYSPITSYTMAPVANRFHLRLENNEEMGDEEVHTIPPELRILLDPGALPALQNPPIRGGEGQNGGLPFPFPDISRRVWNEEGEDGLPRPKDPVIPSIQLFPGLREPEEVQGSVDIALSVKCDNEKMIVAVEKDSFQASGYSGMDVTLLDPTCKAKMNGTHFVLESPLNGCGTRPRWSALDGVVYYNSIVIQVPALGDSSGWPDGYEDLESGDNGFPGDMDEGDASLFTRPEIVVFNCSLQQVRNPSSFQEQPHGNITFNMELYNTDLFLVPSQGVFSVPENGHVYVEVSVTKAEQELGFAIQTCFISPYSNPDRMSHYTIIENICPKDESVKFYSPKRVHFPIPQADMDKKRFSFVFKPVFNTSLLFLQCELTLCTKMEKHPQKLPKCVPPDEACTSLDASIIWAMMQNKKTFTKPLAVIHHEAESKEKGPSMKEPNPISPPIFHGLDTLTVMGIAFAAFVIGALLTGALWYIYSHTGETAGRQQVPTSPPASENSSAAHSIGSTQSTPCSSSSTA

SEQ ID NO: 127-191 - skipped (65 entries)

SEQ ID NO: 192 - protein, 481 aa, synthetic construct
  VARIANT 330: note = Residue may be deleted
ASTKGPSVFPLAPSSKSTSGGTAALGCLVKDYFPEPVTVSWNSGALTSGVHTFPAVLQSSGLYSLSSVVTVPSSSLGTQTYICNVNHKPSNTKVDKRVEPKSCDKTHTCPPCPAPELLGGPSVFLFPPKPKDTLMISRTPEVTCVVVDVSHEDPEVKFNWYVDGVEVHNAKTKPREEQYNSTYRVVSVLTVLHQDWLNGKEYKCKVSNKALPAPIEKTISKAKGQPREPQVCTLPPSREEMTKNQVSLSCAVKGFYPSDIAVEWESNGQPENNYKTTPPVLDSDGSFFLVSKLTVDKSRWQQGNVFSCSVMHEALHNHYTQKSLSLSPGKGGGGSGGGGSGGGGSIPPHVQKSVNNDMIVTDNNGAVKFPQLCKFCDVRFSTCDNQKSCMSNCSITSICEKPQEVCVAVWRKNDENITLETVCHDPKLPYHDFILEDAASPKCIMKEKKKPGETFFMCSCSSDECNDNIIFSEEYNTSNPD

SEQ ID NO: 193 - protein, 481 aa, synthetic construct
  VARIANT 330: note = Residue may be deleted
ASTKGPSVFPLAPSSKSTSGGTAALGCLVKDYFPEPVTVSWNSGALTSGVHTFPAVLQSSGLYSLSSVVTVPSSSLGTQTYICNVNHKPSNTKVDKRVEPKSCDKTHTCPPCPAPELLGGPSVFLFPPKPKDTLMISRTPEVTCVVVDVSHEDPEVKFNWYVDGVEVHNAKTKPREEQYNSTYRVVSVLTVLHQDWLNGKEYKCKVSNKALPAPIEKTISKAKGQPREPQVYTLPPCREEMTKNQVSLWCLVKGFYPSDIAVEWESNGQPENNYKTTPPVLDSDGSFFLYSKLTVDKSRWQQGNVFSCSVMHEALHNHYTQKSLSLSPGKGGGGSGGGGSGGGGSIPPHVQKSVNNDMIVTDNNGAVKFPQLCKFCDVRFSTCDNQKSCMSNCSITSICEKPQEVCVAVWRKNDENITLETVCHDPKLPYHDFILEDAASPKCIMKEKKKPGETFFMCSCSSDECNDNIIFSEEYNTSNPD

SEQ ID NO: 194 - protein, 378 aa, synthetic construct
  VARIANT 227: note = Residue may be deleted
DKTHTCPPCPAPELLGGPSVFLFPPKPKDTLMISRTPEVTCVVVDVSHEDPEVKFNWYVDGVEVHNAKTKPREEQYNSTYRVVSVLTVLHQDWLNGKEYKCKVSNKALPAPIEKTISKAKGQPREPQVCTLPPSREEMTKNQVSLSCAVKGFYPSDIAVEWESNGQPENNYKTTPPVLDSDGSFFLVSKLTVDKSRWQQGNVFSCSVMHEALHNHYTQKSLSLSPGKGGGGSGGGGSGGGGSIPPHVQKSVNNDMIVTDNNGAVKFPQLCKFCDVRFSTCDNQKSCMSNCSITSICEKPQEVCVAVWRKNDENITLETVCHDPKLPYHDFILEDAASPKCIMKEKKKPGETFFMCSCSSDECNDNIIFSEEYNTSNPD

SEQ ID NO: 195 - protein, 378 aa, synthetic construct
  VARIANT 227: note = Residue may be deleted
DKTHTCPPCPAPELLGGPSVFLFPPKPKDTLMISRTPEVTCVVVDVSHEDPEVKFNWYVDGVEVHNAKTKPREEQYNSTYRVVSVLTVLHQDWLNGKEYKCKVSNKALPAPIEKTISKAKGQPREPQVYTLPPCREEMTKNQVSLWCLVKGFYPSDIAVEWESNGQPENNYKTTPPVLDSDGSFFLYSKLTVDKSRWQQGNVFSCSVMHEALHNHYTQKSLSLSPGKGGGGSGGGGSGGGGSIPPHVQKSVNNDMIVTDNNGAVKFPQLCKFCDVRFSTCDNQKSCMSNCSITSICEKPQEVCVAVWRKNDENITLETVCHDPKLPYHDFILEDAASPKCIMKEKKKPGETFFMCSCSSDECNDNIIFSEEYNTSNPD

SEQ ID NO: 196 - protein, 481 aa, synthetic construct
  VARIANT 481: note = Residue may be deleted
IPPHVQKSVNNDMIVTDNNGAVKFPQLCKFCDVRFSTCDNQKSCMSNCSITSICEKPQEVCVAVWRKNDENITLETVCHDPKLPYHDFILEDAASPKCIMKEKKKPGETFFMCSCSSDECNDNIIFSEEYNTSNPDGGGGSGGGGSGGGGSASTKGPSVFPLAPSSKSTSGGTAALGCLVKDYFPEPVTVSWNSGALTSGVHTFPAVLQSSGLYSLSSVVTVPSSSLGTQTYICNVNHKPSNTKVDKRVEPKSCDKTHTCPPCPAPELLGGPSVFLFPPKPKDTLMISRTPEVTCVVVDVSHEDPEVKFNWYVDGVEVHNAKTKPREEQYNSTYRVVSVLTVLHQDWLNGKEYKCKVSNKALPAPIEKTISKAKGQPREPQVCTLPPSREEMTKNQVSLSCAVKGFYPSDIAVEWESNGQPENNYKTTPPVLDSDGSFFLVSKLTVDKSRWQQGNVFSCSVMHEALHNHYTQKSLSLSPGK

SEQ ID NO: 197 - protein, 481 aa, synthetic construct
  VARIANT 481: note = Residue may be deleted
IPPHVQKSVNNDMIVTDNNGAVKFPQLCKFCDVRFSTCDNQKSCMSNCSITSICEKPQEVCVAVWRKNDENITLETVCHDPKLPYHDFILEDAASPKCIMKEKKKPGETFFMCSCSSDECNDNIIFSEEYNTSNPDGGGGSGGGGSGGGGSASTKGPSVFPLAPSSKSTSGGTAALGCLVKDYFPEPVTVSWNSGALTSGVHTFPAVLQSSGLYSLSSVVTVPSSSLGTQTYICNVNHKPSNTKVDKRVEPKSCDKTHTCPPCPAPELLGGPSVFLFPPKPKDTLMISRTPEVTCVVVDVSHEDPEVKFNWYVDGVEVHNAKTKPREEQYNSTYRVVSVLTVLHQDWLNGKEYKCKVSNKALPAPIEKTISKAKGQPREPQVYTLPPCREEMTKNQVSLWCLVKGFYPSDIAVEWESNGQPENNYKTTPPVLDSDGSFFLYSKLTVDKSRWQQGNVFSCSVMHEALHNHYTQKSLSLSPGK

SEQ ID NO: 198 - protein, 257 aa, synthetic construct
IPPHVQKSVNNDMIVTDNNGAVKFPQLCKFCDVRFSTCDNQKSCMSNCSITSICEKPQEVCVAVWRKNDENITLETVCHDPKLPYHDFILEDAASPKCIMKEKKKPGETFFMCSCSSDECNDNIIFSEEYNTSNPDGGGGSGGGGSGGGGSGQPKANPTVTLFPPSSEELQANKATLVCLISDFYPGAVTVAWKADGSPVKAGVETTKPSKQSNNKYAASSYLSLTPEQWKSHRSYSCQVTHEGSTVEKTVAPTECS

SEQ ID NO: 199 - protein, 258 aa, synthetic construct
IPPHVQKSVNNDMIVTDNNGAVKFPQLCKFCDVRFSTCDNQKSCMSNCSITSICEKPQEVCVAVWRKNDENITLETVCHDPKLPYHDFILEDAASPKCIMKEKKKPGETFFMCSCSSDECNDNIIFSEEYNTSNPDGGGGSGGGGSGGGGSRTVAAPSVFIFPPSDEQLKSGTASVVCLLNNFYPREAKVQWKVDNALQSGNSQESVTEQDSKDSTYSLSSTLTLSKADYEKHKVYACEVTHQGLSSPVTKSFNRGEC

SEQ ID NO: 200 - protein, 7 aa, synthetic construct
FTGYVMH

SEQ ID NO: 201 - protein, 17 aa, synthetic construct
FINPYNDDIQSNERFRG

SEQ ID NO: 202 - protein, 15 aa, synthetic construct
GAGYNFDGAYRFFDF

SEQ ID NO: 203 - protein, 28 aa, synthetic construct
EVRLQQSGPDLIKPGASVKMSCKASGYT

SEQ ID NO: 204 - protein, 14 aa, synthetic construct
WVKQRPGQGLEWIG

SEQ ID NO: 205 - protein, 32 aa, synthetic construct
KATLTSDKSSTTAYMELSSLTSEDSAVYYCAR

SEQ ID NO: 206 - protein, 11 aa, synthetic construct
WGQGTTLTVSS

SEQ ID NO: 207 - protein, 28 aa, synthetic construct
QVQLVQSGAEVKKPGASVKVSCKASGYT

SEQ ID NO: 208 - protein, 14 aa, synthetic construct
WVRQAPGQGLEWMG

SEQ ID NO: 209 - protein, 32 aa, synthetic construct
RVTMTSDKSTTTAYMELSSLRSEDTAVYYCAR

SEQ ID NO: 210 - protein, 11 aa, synthetic construct
WGQGTLVTVSS

SEQ ID NO: 211 - protein, 28 aa, synthetic construct
QVQLVQSGAEVKKPGASVKVSCKASGYT

SEQ ID NO: 212 - protein, 14 aa, synthetic construct
WVRQAPGQGLEWMG

SEQ ID NO: 213 - protein, 32 aa, synthetic construct
WVTMTSDKSITTAYMELSRLRSDDTAVYYCAR

SEQ ID NO: 214 - protein, 11 aa, synthetic construct
WGQGTLVTVSS

SEQ ID NO: 215 - protein, 28 aa, synthetic construct
QVQLVQSGAEVKKPGSSVKVSCKASGYT

SEQ ID NO: 216 - protein, 14 aa, synthetic construct
WVRQAPGQGLEWMG

SEQ ID NO: 217 - protein, 32 aa, synthetic construct
RVTITSDKSTTTAYMELSSLRSEDTAVYYCAR

SEQ ID NO: 218 - protein, 11 aa, synthetic construct
WGQGTLVTVSS

SEQ ID NO: 219 - protein, 28 aa, synthetic construct
QVQLVQSGAEVKKPGASVKVSCKASGYT

SEQ ID NO: 220 - protein, 14 aa, synthetic construct
WVRQAPGQRLEWMG

SEQ ID NO: 221 - protein, 32 aa, synthetic construct
RVTITSDKSATTAYMELSSLRSEDTAVYYCAR

SEQ ID NO: 222 - protein, 11 aa, synthetic construct
WGQGTLVTVSS

SEQ ID NO: 223 - protein, 16 aa, synthetic construct
RSSQRLVHSNGNTYLH

SEQ ID NO: 224 - protein, 7 aa, synthetic construct
RVSNRFP

SEQ ID NO: 225 - protein, 9 aa, synthetic construct
SQSTHVPYT

SEQ ID NO: 226 - protein, 23 aa, synthetic construct
DVVMTQSPLSLPVSLGDQASISC

SEQ ID NO: 227 - protein, 15 aa, synthetic construct
WYLQKPGQSPKLLIY

SEQ ID NO: 228 - protein, 32 aa, synthetic construct
GVPDRFSGSGSGTDFTLKISRVEAEDLGIYFC

SEQ ID NO: 229 - protein, 10 aa, synthetic construct
FGGGTKLEIK

SEQ ID NO: 230 - protein, 23 aa, synthetic construct
DVVMTQSPLSLPVTPGEPASISC

SEQ ID NO: 231 - protein, 15 aa, synthetic construct
WYLQKPGQSPQLLIY

SEQ ID NO: 232 - protein, 32 aa, synthetic construct
GVPDRFSGSGSGTDFTLKISRVEAEDVGVYFC

SEQ ID NO: 233 - protein, 10 aa, synthetic construct
FGGGTKVEIK

SEQ ID NO: 234 - protein, 23 aa, synthetic construct
EVVMTQSPGTLSLSPGERATLSC

SEQ ID NO: 235 - protein, 15 aa, synthetic construct
WYQQKPGQAPRLLIY

SEQ ID NO: 236 - protein, 32 aa, synthetic construct
GIPDRFSGSGSGTDFTLTISRLEPEDFAVYFC

SEQ ID NO: 237 - protein, 10 aa, synthetic construct
FGGGTKVEIK

SEQ ID NO: 238 - protein, 23 aa, synthetic construct
DVVMTQSPLSLPVTLGQPASISC

SEQ ID NO: 239 - protein, 15 aa, synthetic construct
WYQQRPGQSPRLLIY

SEQ ID NO: 240 - protein, 32 aa, synthetic construct; identical to SEQ ID NO: 232

SEQ ID NO: 241 - protein, 10 aa, synthetic construct
FGGGTKVEIK

SEQ ID NO: 242 - protein, 23 aa, synthetic construct
DVVMTQTPLSLPVTPGEPASISC

SEQ ID NO: 243 - protein, 15 aa, synthetic construct
WYLQKPGQSPQLLIY

SEQ ID NO: 244 - protein, 32 aa, synthetic construct; identical to SEQ ID NO: 232

SEQ ID NO: 245 - protein, 10 aa, synthetic construct
FGGGTKVEIK

SEQ ID NO: 246 - protein, 23 aa, synthetic construct
DVVMTQTPLSLSVTPGQPASISC

SEQ ID NO: 247 - protein, 15 aa, synthetic construct
WYLQKPGQSPQLLIY

SEQ ID NO: 248 - protein, 32 aa, synthetic construct; identical to SEQ ID NO: 232

SEQ ID NO: 249 - protein, 10 aa, synthetic construct
FGGGTKVEIK

SEQ ID NO: 250 - protein, 124 aa, synthetic construct
EVRLQQSGPDLIKPGASVKMSCKASGYTFTGYVMHWVKQRPGQGLEWIGFINPYNDDIQSNERFRGKATLTSDKSSTTAYMELSSLTSEDSAVYYCARGAGYNFDGAYRFFDFWGQGTTLTVSS

SEQ ID NO: 251 - protein, 124 aa, synthetic construct
QVQLVQSGAEVKKPGASVKVSCKASGYTFTGYVMHWVRQAPGQGLEWMGFINPYNDDIQSNERFRGRVTMTSDKSTTTAYMELSSLRSEDTAVYYCARGAGYNFDGAYRFFDFWGQGTLVTVSS

SEQ ID NO: 252 - protein, 124 aa, synthetic construct
QVQLVQSGAEVKKPGASVKVSCKASGYTFTGYVMHWVRQAPGQGLEWMGFINPYNDDIQSNERFRGWVTMTSDKSITTAYMELSRLRSDDTAVYYCARGAGYNFDGAYRFFDFWGQGTLVTVSS

SEQ ID NO: 253 - protein, 124 aa, synthetic construct
QVQLVQSGAEVKKPGSSVKVSCKASGYTFTGYVMHWVRQAPGQGLEWMGFINPYNDDIQSNERFRGRVTITSDKSTTTAYMELSSLRSEDTAVYYCARGAGYNFDGAYRFFDFWGQGTLVTVSS

SEQ ID NO: 254 - protein, 124 aa, synthetic construct
QVQLVQSGAEVKKPGASVKVSCKASGYTFTGYVMHWVRQAPGQRLEWMGFINPYNDDIQSNERFRGRVTITSDKSATTAYMELSSLRSEDTAVYYCARGAGYNFDGAYRFFDFWGQGTLVTVSS

SEQ ID NO: 255 - protein, 112 aa, synthetic construct
DVVMTQSPLSLPVSLGDQASISCRSSQRLVHSNGNTYLHWYLQKPGQSPKLLIYRVSNRFPGVPDRFSGSGSGTDFTLKISRVEAEDLGIYFCSQSTHVPYTFGGGTKLEIK

SEQ ID NO: 256 - protein, 112 aa, synthetic construct
DVVMTQSPLSLPVTPGEPASISCRSSQRLVHSNGNTYLHWYLQKPGQSPQLLIYRVSNRFPGVPDRFSGSGSGTDFTLKISRVEAEDVGVYFCSQSTHVPYTFGGGTKVEIK

SEQ ID NO: 257 - protein, 112 aa, synthetic construct
EVVMTQSPGTLSLSPGERATLSCRSSQRLVHSNGNTYLHWYQQKPGQAPRLLIYRVSNRFPGIPDRFSGSGSGTDFTLTISRLEPEDFAVYFCSQSTHVPYTFGGGTKVEIK

SEQ ID NO: 258 - protein, 112 aa, synthetic construct
DVVMTQSPLSLPVTLGQPASISCRSSQRLVHSNGNTYLHWYQQRPGQSPRLLIYRVSNRFPGVPDRFSGSGSGTDFTLKISRVEAEDVGVYFCSQSTHVPYTFGGGTKVEIK

SEQ ID NO: 259 - protein, 112 aa, synthetic construct
DVVMTQTPLSLPVTPGEPASISCRSSQRLVHSNGNTYLHWYLQKPGQSPQLLIYRVSNRFPGVPDRFSGSGSGTDFTLKISRVEAEDVGVYFCSQSTHVPYTFGGGTKVEIK

SEQ ID NO: 260 - protein, 112 aa, synthetic construct
DVVMTQTPLSLSVTPGQPASISCRSSQRLVHSNGNTYLHWYLQKPGQSPQLLIYRVSNRFPGVPDRFSGSGSGTDFTLKISRVEAEDVGVYFCSQSTHVPYTFGGGTKVEIK

SEQ ID NO: 261 - protein, 124 aa, synthetic construct
QVQLVQSGAEVKKPGSSVKVSCKASGYTFTGYVMHWVRQAPGQGLEWMGFIIPIFGTANYAQKFQGRVTITSDKSTTTAYMELSSLRSEDTAVYYCARGAGYNFDGAYRFFDFWGQGTLVTVSS

SEQ ID NO: 262 - protein, 124 aa, synthetic construct; identical to SEQ ID NO: 261

SEQ ID NO: 263 - protein, 124 aa, synthetic construct; identical to SEQ ID NO: 261

SEQ ID NO: 264 - protein, 124 aa, synthetic construct; identical to SEQ ID NO: 261

SEQ ID NO: 265 - protein, 124 aa, synthetic construct; identical to SEQ ID NO: 261

SEQ ID NO: 266 - protein, 124 aa, synthetic construct; identical to SEQ ID NO: 261

SEQ ID NO: 267 - protein, 112 aa, synthetic construct
DVVMTQSPLSLPVTLGQPASISCRSSQRLVHSNANTYLHWYQQRPGQSPRLLIYRVSNRFPGVPDRFSGSGSGTDFTLKISRVEAEDVGVYFCSQSTHVPYTFGGGTKVEIK

SEQ ID NO: 268 - protein, 112 aa, synthetic construct
DVVMTQSPLSLPVTLGQPASISCRSSQRLVHSNGNAYLHWYQQRPGQSPRLLIYRVSNRFPGVPDRFSGSGSGTDFTLKISRVEAEDVGVYFCSQSTHVPYTFGGGTKVEIK

SEQ ID NO: 269 - protein, 112 aa, synthetic construct
DVVMTQSPLSLPVTLGQPASISCRSSQRLVHSNANAYLHWYQQRPGQSPRLLIYRVSNRFPGVPDRFSGSGSGTDFTLKISRVEAEDVGVYFCSQSTHVPYTFGGGTKVEIK

SEQ ID NO: 270 - protein, 112 aa, synthetic construct
DVVMTQSPLSLPVTLGQPASISCRSSQRLVHSGGNTYLHWYQQRPGQSPRLLIYRVSNRFPGVPDRFSGSGSGTDFTLKISRVEAEDVGVYFCSQSTHVPYTFGGGTKVEIK

SEQ ID NO: 271 - protein, 112 aa, synthetic construct
DVVMTQSPLSLPVTLGQPASISCRSSQRLVHSNGSTYLHWYQQRPGQSPRLLIYRVSNRFPGVPDRFSGSGSGTDFTLKISRVEAEDVGVYFCSQSTHVPYTFGGGTKVEIK

SEQ ID NO: 272 - protein, 112 aa, synthetic construct
DVVMTQSPLSLPVTLGQPASISCRSSQRLVHSGGSTYLHWYQQRPGQSPRLLIYRVSNRFPGVPDRFSGSGSGTDFTLKISRVEAEDVGVYFCSQSTHVPYTFGGGTKVEIK

SEQ ID NO: 273 - protein, 23 aa, synthetic construct
DVVMTQSPLSLPVTLGQPASISC

SEQ ID NO: 274 - protein, 16 aa, synthetic construct
RSSQRLVHSNANTYLH

SEQ ID NO: 275 - protein, 15 aa, synthetic construct
WYQQRPGQSPRLLIY

SEQ ID NO: 276 - protein, 7 aa, synthetic construct
RVSNRFP

SEQ ID NO: 277 - protein, 32 aa, synthetic construct; identical to SEQ ID NO: 232

SEQ ID NO: 278 - protein, 10 aa, synthetic construct
SQSTHVPYTF

SEQ ID NO: 279 - protein, 9 aa, synthetic construct
GGGTKVEIK

SEQ ID NO: 280 - protein, 28 aa, synthetic construct
QVQLVQSGAEVKKPGSSVKVSCKASGYT

SEQ ID NO: 281 - protein, 7 aa, synthetic construct
FTGYVMH

SEQ ID NO: 282 - protein, 14 aa, synthetic construct
WVRQAPGQGLEWMG

SEQ ID NO: 283 - protein, 17 aa, synthetic construct
FIIPIFGTANYAQKFQG

SEQ ID NO: 284 - protein, 32 aa, synthetic construct; identical to SEQ ID NO: 217

SEQ ID NO: 285 - protein, 15 aa, synthetic construct
GAGYNFDGAYRFFDF

SEQ ID NO: 286 - protein, 11 aa, synthetic construct
WGQGTLVTVSS

SEQ ID NO: 287 - protein, 23 aa, synthetic construct
DVVMTQSPLSLPVTLGQPASISC

SEQ ID NO: 288 - protein, 16 aa, synthetic construct
RSSQRLVHSNGNAYLH

SEQ ID NO: 289 - protein, 15 aa, synthetic construct
WYQQRPGQSPRLLIY

SEQ ID NO: 290 - protein, 7 aa, synthetic construct
RVSNRFP

SEQ ID NO: 291 - protein, 32 aa, synthetic construct; identical to SEQ ID NO: 232

SEQ ID NO: 292 - protein, 10 aa, synthetic construct
SQSTHVPYTF

SEQ ID NO: 293 - protein, 9 aa, synthetic construct
GGGTKVEIK

SEQ ID NO: 294 - protein, 28 aa, synthetic construct
QVQLVQSGAEVKKPGSSVKVSCKASGYT

SEQ ID NO: 295 - protein, 7 aa, synthetic construct
FTGYVMH

SEQ ID NO: 296 - protein, 14 aa, synthetic construct
WVRQAPGQGLEWMG

SEQ ID NO: 297 - protein, 17 aa, synthetic construct
FIIPIFGTANYAQKFQG

SEQ ID NO: 298 - protein, 32 aa, synthetic construct; identical to SEQ ID NO: 217

SEQ ID NO: 299 - protein, 15 aa, synthetic construct
GAGYNFDGAYRFFDF

SEQ ID NO: 300 - protein, 11 aa, synthetic construct
WGQGTLVTVSS

SEQ ID NO: 301 - protein, 23 aa, synthetic construct
DVVMTQSPLSLPVTLGQPASISC

SEQ ID NO: 302 - protein, 16 aa, synthetic construct
RSSQRLVHSNANAYLH

SEQ ID NO: 303 - protein, 15 aa, synthetic construct
WYQQRPGQSPRLLIY

SEQ ID NO: 304 - protein, 7 aa, synthetic construct
RVSNRFP

SEQ ID NO: 305 - protein, 32 aa, synthetic construct; identical to SEQ ID NO: 232

SEQ ID NO: 306 - protein, 9 aa, synthetic construct
SQSTHVPYT

SEQ ID NO: 307 - protein, 10 aa, synthetic construct
FGGGTKVEIK

SEQ ID NO: 308 - protein, 28 aa, synthetic construct
QVQLVQSGAEVKKPGSSVKVSCKASGYT

SEQ ID NO: 309 - protein, 7 aa, synthetic construct
FTGYVMH

SEQ ID NO: 310 - protein, 14 aa, synthetic construct
WVRQAPGQGLEWMG

SEQ ID NO: 311 - protein, 17 aa, synthetic construct
FIIPIFGTANYAQKFQG

SEQ ID NO: 312 - protein, 32 aa, synthetic construct; identical to SEQ ID NO: 217

SEQ ID NO: 313 - protein, 15 aa, synthetic construct
GAGYNFDGAYRFFDF

SEQ ID NO: 314 - protein, 11 aa, synthetic construct
WGQGTLVTVSS

SEQ ID NO: 315 - protein, 23 aa, synthetic construct
DVVMTQSPLSLPVTLGQPASISC

SEQ ID NO: 316 - protein, 16 aa, synthetic construct
RSSQRLVHSGGNTYLH

SEQ ID NO: 317 - protein, 15 aa, synthetic construct
WYQQRPGQSPRLLIY

SEQ ID NO: 318 - protein, 7 aa, synthetic construct
RVSNRFP

SEQ ID NO: 319 - protein, 32 aa, synthetic construct; identical to SEQ ID NO: 232

SEQ ID NO: 320 - protein, 9 aa, synthetic construct
SQSTHVPYT

SEQ ID NO: 321 - protein, 10 aa, synthetic construct
FGGGTKVEIK

SEQ ID NO: 322 - protein, 28 aa, synthetic construct
QVQLVQSGAEVKKPGSSVKVSCKASGYT

SEQ ID NO: 323 - protein, 7 aa, synthetic construct
FTGYVMH

SEQ ID NO: 324 - protein, 14 aa, synthetic construct
WVRQAPGQGLEWMG

SEQ ID NO: 325 - protein, 17 aa, synthetic construct
FIIPIFGTANYAQKFQG

SEQ ID NO: 326 - protein, 32 aa, synthetic construct; identical to SEQ ID NO: 217

SEQ ID NO: 327 - protein, 15 aa, synthetic construct
GAGYNFDGAYRFFDF

SEQ ID NO: 328 - protein, 11 aa, synthetic construct
WGQGTLVTVSS

SEQ ID NO: 329 - protein, 23 aa, synthetic construct
DVVMTQSPLSLPVTLGQPASISC

SEQ ID NO: 330 - protein, 16 aa, synthetic construct
RSSQRLVHSNGSTYLH

SEQ ID NO: 331 - protein, 15 aa, synthetic construct
WYQQRPGQSPRLLIY

SEQ ID NO: 332 - protein, 7 aa, synthetic construct
RVSNRFP

SEQ ID NO: 333 - protein, 32 aa, synthetic construct; identical to SEQ ID NO: 232

SEQ ID NO: 334 - protein, 9 aa, synthetic construct
SQSTHVPYT

SEQ ID NO: 335 - protein, 10 aa, synthetic construct
FGGGTKVEIK

SEQ ID NO: 336 - protein, 28 aa, synthetic construct
QVQLVQSGAEVKKPGSSVKVSCKASGYT

SEQ ID NO: 337 - protein, 7 aa, synthetic construct
FTGYVMH

SEQ ID NO: 338 - protein, 14 aa, synthetic construct
WVRQAPGQGLEWMG

SEQ ID NO: 339 - protein, 17 aa, synthetic construct
FIIPIFGTANYAQKFQG

SEQ ID NO: 340 - protein, 32 aa, synthetic construct; identical to SEQ ID NO: 217

SEQ ID NO: 341 - protein, 15 aa, synthetic construct
GAGYNFDGAYRFFDF

SEQ ID NO: 342 - protein, 11 aa, synthetic construct
WGQGTLVTVSS

SEQ ID NO: 343 - protein, 23 aa, synthetic construct
DVVMTQSPLSLPVTLGQPASISC

SEQ ID NO: 344 - protein, 16 aa, synthetic construct
RSSQRLVHSGGSTYLH

SEQ ID NO: 345 - protein, 15 aa, synthetic construct
WYQQRPGQSPRLLIY

SEQ ID NO: 346 - protein, 7 aa, synthetic construct
RVSNRFP

SEQ ID NO: 347 - protein, 32 aa, synthetic construct; identical to SEQ ID NO: 232

SEQ ID NO: 348 - protein, 9 aa, synthetic construct
SQSTHVPYT

SEQ ID NO: 349 - protein, 10 aa, synthetic construct
FGGGTKVEIK

SEQ ID NO: 350 - protein, 28 aa, synthetic construct
QVQLVQSGAEVKKPGSSVKVSCKASGYT

SEQ ID NO: 351 - protein, 7 aa, synthetic construct
FTGYVMH

SEQ ID NO: 352 - protein, 14 aa, synthetic construct
WVRQAPGQGLEWMG

SEQ ID NO: 353 - protein, 17 aa, synthetic construct
FIIPIFGTANYAQKFQG

SEQ ID NO: 354 - protein, 32 aa, synthetic construct; identical to SEQ ID NO: 217

SEQ ID NO: 355 - protein, 15 aa, synthetic construct
GAGYNFDGAYRFFDF

SEQ ID NO: 356 - protein, 11 aa, synthetic construct
WGQGTLVTVSS

SEQ ID NO: 357 - protein, 118 aa, synthetic construct
EIQLLESGGGLVQPGGSLRLSCAVSGFSITTTGYHWNWVRQAPGKGLEWVGYIYSSGSTSYNPSLKSRFTISRDTSKNTFYLQMNSLRAEDTAVYYCARGDWHYFDYWGQGTMVTVSS

SEQ ID NO: 358 - protein, 118 aa, synthetic construct; identical to SEQ ID NO: 357

SEQ ID NO: 359 - protein, 118 aa, synthetic construct; identical to SEQ ID NO: 357

SEQ ID NO: 360 - protein, 118 aa, synthetic construct; identical to SEQ ID NO: 357

SEQ ID NO: 361 - protein, 118 aa, synthetic construct
EIQLLESGGGLVQPGGSLRLSCAVSGFSITTTGYHWNWVRQAPGKGLEWVGYIYSSGSTSYAPSLKSRFTISRDTSKNTFYLQMNSLRAEDTAVYYCARGDWHYFDYWGQGTMVTVSS

SEQ ID NO: 362 - protein, 118 aa, synthetic construct; identical to SEQ ID NO: 361

SEQ ID NO: 363 - protein, 118 aa, synthetic construct; identical to SEQ ID NO: 361

SEQ ID NO: 364 - protein, 118 aa, synthetic construct; identical to SEQ ID NO: 361

SEQ ID NO: 365 - protein, 108 aa, synthetic construct
DSVTTQSPLSLPVTLGQPASISCSGEKLSDKYVHWYQQRPGQSPRMLIYENDRRPSGVPDRFSGSNSGNDATLKISRVEAEDVGVYFCQFWDSTASAVFGGGTKVEIK

SEQ ID NO: 366 - protein, 108 aa, synthetic construct
DSVTTQSPLSLPVTLGQPASISCSGEKLSDKYVHWYQQRPGQSPRMLIYENDRRPSGVPDRFSGSNSGNDATLKISRVEAEDVGVYFCQFWASTNSAVFGGGTKVEIK

SEQ ID NO: 367 - protein, 107 aa, synthetic construct
SSETTQPPSVSVSPGQTASITCSGEKLSDKYVHWYQQKPGQSPVMVIYENDRRPSGIPERFSGSNSGNTATLTISGTQAMDEADYFCQFWASTNSAVFGGGTQLTVL

SEQ ID NO: 368 - protein, 107 aa, synthetic construct
SSETTQPPSVSVSPGQTASITCSGEKLSDKYVHWYQQKPGQSPVMVIYENDRRPSGIPERFSGSNSGNTATLTISGTQAMDEADYFCQFWDSTASAVFGGGTQLTVL

SEQ ID NO: 369 - protein, 108 aa, synthetic construct
DSVTTQSPLSLPVTLGQPASISCSGEKLSDKYVHWYQQRPGQSPRMLIYENDRRPSGVPDRFSGSNSGNDATLKISRVEAEDVGVYFCQFWDSTNSAVFGGGTKVEIK

SEQ ID NO: 370 - protein, 107 aa, synthetic construct
SSETTQPPSVSVSPGQTASITCSGEKLSDKYVHWYQQKPGQSPVMVIYENDRRPSGIPERFSGSNSGNTATLTISGTQAMDEADYFCQFWDSTNSAVFGGGTQLTVL

SEQ ID NO: 371 - protein, 108 aa, synthetic construct
DSVTTQSPLSLPVTLGQPASISCSGEKLSDKYVHWYQQRPGQSPRMLIYENDRRPSGVPDRFSGSNSGNDATLKISRVEAEDVGVYFCQFWASTASAVFGGGTKVEIK

SEQ ID NO: 372 - protein, 107 aa, synthetic construct
SSETTQPPSVSVSPGQTASITCSGEKLSDKYVHWYQQKPGQSPVMVIYENDRRPSGIPERFSGSNSGNTATLTISGTQAMDEADYFCQFWASTASAVFGGGTQLTVL

SEQ ID NO: 373 - protein, 246 aa, synthetic construct
EIQLLESGGGLVQPGGSLRLSCAVSGFSITTTGYHWNWVRQAPGKGLEWVGYIYSSGSTSYNPSLKSRFTISRDTSKNTFYLQMNSLRAEDTAVYYCARGDWHYFDYWGQGTMVTVSSGGGGSGGGGSGGGGSGGGGSDSVTTQSPLSLPVTLGQPASISCSGEKLSDKYVHWYQQRPGQSPRMLIYENDRRPSGVPDRFSGSNSGNDATLKISRVEAEDVGVYFCQFWDSTASAVFGGGTKVEIK

SEQ ID NO: 374 - protein, 28 aa, synthetic construct
EIQLLESGGGLVQPGGSLRLSCAVSGFS

SEQ ID NO: 375 - protein, 9 aa, synthetic construct
ITTTGYHWN

SEQ ID NO: 376 - protein, 14 aa, synthetic construct
WVRQAPGKGLEWVG

SEQ ID NO: 377 - protein, 16 aa, synthetic construct
YIYSSGSTSYNPSLKS

SEQ ID NO: 378 - protein, 32 aa, synthetic construct
RFTISRDTSKNTFYLQMNSLRAEDTAVYYCAR

SEQ ID NO: 379 - protein, 8 aa, synthetic construct
GDWHYFDY

SEQ ID NO: 380 - protein, 11 aa, synthetic construct
WGQGTMVTVSS

SEQ ID NO: 381 - protein, 23 aa, synthetic construct
DSVTTQSPLSLPVTLGQPASISC

SEQ ID NO: 382 - protein, 11 aa, synthetic construct
SGEKLSDKYVH

SEQ ID NO: 383 - protein, 15 aa, synthetic construct
WYQQRPGQSPRMLIY

SEQ ID NO: 384 - protein, 7 aa, synthetic construct
ENDRRPS

SEQ ID NO: 385 - protein, 32 aa, synthetic construct
GVPDRFSGSNSGNDATLKISRVEAEDVGVYFC

SEQ ID NO: 386 - protein, 10 aa, synthetic construct
QFWDSTASAV

SEQ ID NO: 387 - protein, 10 aa, synthetic construct
FGGGTKVEIK

SEQ ID NO: 388 - protein, 28 aa, synthetic construct
EIQLLESGGGLVQPGGSLRLSCAVSGFS

SEQ ID NO: 389 - protein, 9 aa, synthetic construct
ITTTGYHWN

SEQ ID NO: 390 - protein, 14 aa, synthetic construct
WVRQAPGKGLEWVG

SEQ ID NO: 391 - protein, 16 aa, synthetic construct
YIYSSGSTSYNPSLKS

SEQ ID NO: 392 - protein, 32 aa, synthetic construct; identical to SEQ ID NO: 378

SEQ ID NO: 393 - protein, 8 aa, synthetic construct
GDWHYFDY

SEQ ID NO: 394 - protein, 11 aa, synthetic construct
WGQGTMVTVSS

SEQ ID NO: 395 - protein, 23 aa, synthetic construct
DSVTTQSPLSLPVTLGQPASISC

SEQ ID NO: 396 - protein, 11 aa, synthetic construct
SGEKLSDKYVH

SEQ ID NO: 397 - protein, 15 aa, synthetic construct
WYQQRPGQSPRMLIY

SEQ ID NO: 398 - protein, 7 aa, synthetic construct
ENDRRPS

SEQ ID NO: 399 - protein, 32 aa, synthetic construct; identical to SEQ ID NO: 385

SEQ ID NO: 400 - protein, 10 aa, synthetic construct
QFWASTNSAV

SEQ ID NO: 401 - protein, 10 aa, synthetic construct
FGGGTKVEIK

SEQ ID NO: 402 - protein, 28 aa, synthetic construct
EIQLLESGGGLVQPGGSLRLSCAVSGFS

SEQ ID NO: 403 - protein, 9 aa, synthetic construct
ITTTGYHWN

SEQ ID NO: 404 - protein, 14 aa, synthetic construct
WVRQAPGKGLEWVG

SEQ ID NO: 405 - protein, 16 aa, synthetic construct
YIYSSGSTSYNPSLKS

SEQ ID NO: 406 - protein, 32 aa, synthetic construct; identical to SEQ ID NO: 378

SEQ ID NO: 407 - protein, 8 aa, synthetic construct
GDWHYFDY

SEQ ID NO: 408 - protein, 11 aa, synthetic construct
WGQGTMVTVSS

SEQ ID NO: 409 - protein, 22 aa, synthetic construct
SSETTQPPSVSVSPGQTASITC

SEQ ID NO: 410 - protein, 11 aa, synthetic construct
SGEKLSDKYVH

SEQ ID NO: 411 - protein, 15 aa, synthetic construct
WYQQKPGQSPVMVIY

SEQ ID NO: 412 - protein, 7 aa, synthetic construct
ENDRRPS

SEQ ID NO: 413 - protein, 32 aa, synthetic construct
GIPERFSGSNSGNTATLTISGTQAMDEADYFC

SEQ ID NO: 414 - protein, 10 aa, synthetic construct
QFWASTNSAV

SEQ ID NO: 415 - protein, 10 aa, synthetic construct
FGGGTQLTVL

SEQ ID NO: 416 - protein, 28 aa, synthetic construct
EIQLLESGGGLVQPGGSLRLSCAVSGFS

SEQ ID NO: 417 - protein, 9 aa, synthetic construct
ITTTGYHWN

SEQ ID NO: 418 - protein, 14 aa, synthetic construct
WVRQAPGKGLEWVG

SEQ ID NO: 419 - protein, 16 aa, synthetic construct
YIYSSGSTSYNPSLKS

SEQ ID NO: 420 - protein, 32 aa, synthetic construct; identical to SEQ ID NO: 378

SEQ ID NO: 421 - protein, 8 aa, synthetic construct
GDWHYFDY

SEQ ID NO: 422 - protein, 11 aa, synthetic construct
WGQGTMVTVSS

SEQ ID NO: 423 - protein, 22 aa, synthetic construct
SSETTQPPSVSVSPGQTASITC

SEQ ID NO: 424 - protein, 11 aa, synthetic construct
SGEKLSDKYVH

SEQ ID NO: 425 - protein, 15 aa, synthetic construct
WYQQKPGQSPVMVIY

SEQ ID NO: 426 - protein, 7 aa, synthetic construct
ENDRRPS

SEQ ID NO: 427 - protein, 32 aa, synthetic construct; identical to SEQ ID NO: 413

SEQ ID NO: 428 - protein, 10 aa, synthetic construct
QFWDSTASAV

SEQ ID NO: 429 - protein, 10 aa, synthetic construct
FGGGTQLTVL

SEQ ID NO: 430 - protein, 28 aa, synthetic construct
EIQLLESGGGLVQPGGSLRLSCAVSGFS

SEQ ID NO: 431 - protein, 9 aa, synthetic construct
ITTTGYHWN

SEQ ID NO: 432 - protein, 14 aa, synthetic construct
WVRQAPGKGLEWVG

SEQ ID NO: 433 - protein, 16 aa, synthetic construct
YIYSSGSTSYAPSLKS

SEQ ID NO: 434 - protein, 32 aa, synthetic construct; identical to SEQ ID NO: 378

SEQ ID NO: 435 - protein, 8 aa, synthetic construct
GDWHYFDY

SEQ ID NO: 436 - protein, 11 aa, synthetic construct
WGQGTMVTVSS

SEQ ID NO: 437 - protein, 23 aa, synthetic construct
DSVTTQSPLSLPVTLGQPASISC

SEQ ID NO: 438 - protein, 11 aa, synthetic construct
SGEKLSDKYVH

SEQ ID NO: 439 - protein, 15 aa, synthetic construct
WYQQRPGQSPRMLIY

SEQ ID NO: 440 - protein, 7 aa, synthetic construct
ENDRRPS

SEQ ID NO: 441 - protein, 32 aa, synthetic construct; identical to SEQ ID NO: 385

SEQ ID NO: 442 - protein, 10 aa, synthetic construct
QFWDSTNSAV

SEQ ID NO: 443 - protein, 10 aa, synthetic construct
FGGGTKVEIK

SEQ ID NO: 444 - protein, 28 aa, synthetic construct
EIQLLESGGGLVQPGGSLRLSCAVSGFS

SEQ ID NO: 445 - protein, 9 aa, synthetic construct
ITTTGYHWN

SEQ ID NO: 446 - protein, 14 aa, synthetic construct
WVRQAPGKGLEWVG

SEQ ID NO: 447 - protein, 16 aa, synthetic construct
YIYSSGSTSYAPSLKS

SEQ ID NO: 448 - protein, 32 aa, synthetic construct; identical to SEQ ID NO: 378

SEQ ID NO: 449 - protein, 8 aa, synthetic construct
GDWHYFDY

SEQ ID NO: 450 - protein, 11 aa, synthetic construct
WGQGTMVTVSS

SEQ ID NO: 451 - protein, 22 aa, synthetic construct
SSETTQPPSVSVSPGQTASITC

SEQ ID NO: 452 - protein, 11 aa, synthetic construct
SGEKLSDKYVH

SEQ ID NO: 453 - protein, 15 aa, synthetic construct
WYQQKPGQSPVMVIY

SEQ ID NO: 454 - protein, 7 aa, synthetic construct
ENDRRPS

SEQ ID NO: 455 - protein, 32 aa, synthetic construct; identical to SEQ ID NO: 413

SEQ ID NO: 456 - protein, 10 aa, synthetic construct
QFWDSTNSAV

SEQ ID NO: 457 - protein, 10 aa, synthetic construct
FGGGTQLTVL

SEQ ID NO: 458 - protein, 28 aa, synthetic construct
EIQLLESGGGLVQPGGSLRLSCAVSGFS

SEQ ID NO: 459 - protein, 9 aa, synthetic construct
ITTTGYHWN

SEQ ID NO: 460 - protein, 14 aa, synthetic construct
WVRQAPGKGLEWVG

SEQ ID NO: 461 - protein, 16 aa, synthetic construct
YIYSSGSTSYAPSLKS

SEQ ID NO: 462 - protein, 32 aa, synthetic construct; identical to SEQ ID NO: 378

SEQ ID NO: 463 - protein, 8 aa, synthetic construct
GDWHYFDY

SEQ ID NO: 464 - protein, 11 aa, synthetic construct
WGQGTMVTVSS

SEQ ID NO: 465 - protein, 23 aa, synthetic construct
DSVTTQSPLSLPVTLGQPASISC

SEQ ID NO: 466 - protein, 11 aa, synthetic construct
SGEKLSDKYVH

SEQ ID NO: 467 - protein, 15 aa, synthetic construct
WYQQRPGQSPRMLIY

SEQ ID NO: 468 - protein, 7 aa, synthetic construct
ENDRRPS

SEQ ID NO: 469 - protein, 10 aa, synthetic construct
QFWASTASAV

SEQ ID NO: 470 - protein, 10 aa, synthetic construct
FGGGTKVEIK

SEQ ID NO: 471 - protein, 28 aa, synthetic construct
EIQLLESGGGLVQPGGSLRLSCAVSGFS

SEQ ID NO: 472 - protein, 9 aa, synthetic construct
ITTTGYHWN

SEQ ID NO: 473 - protein, 14 aa, synthetic construct
WVRQAPGKGLEWVG

SEQ ID NO: 474 - protein, 16 aa, synthetic construct
YIYSSGSTSYAPSLKS

SEQ ID NO: 475 - protein, 32 aa, synthetic construct; identical to SEQ ID NO: 378

SEQ ID NO: 476 - protein, 8 aa, synthetic construct
GDWHYFDY

SEQ ID NO: 477 - protein, 11 aa, synthetic construct
WGQGTMVTVSS

SEQ ID NO: 478 - protein, 22 aa, synthetic construct
SSETTQPPSVSVSPGQTASITC

SEQ ID NO: 479 - protein, 11 aa, synthetic construct
SGEKLSDKYVH

SEQ ID NO: 480 - protein, 15 aa, synthetic construct
WYQQKPGQSPVMVIY

SEQ ID NO: 481 - protein, 7 aa, synthetic construct
ENDRRPS

SEQ ID NO: 482 - protein, 32 aa, synthetic construct; identical to SEQ ID NO: 413

SEQ ID NO: 483 - protein, 10 aa, synthetic construct
QFWASTASAV

SEQ ID NO: 484 - protein, 10 aa, synthetic construct
FGGGTQLTVL

SEQ ID NO: 485 - protein, 246 aa, synthetic construct
EIQLLESGGGLVQPGGSLRLSCAVSGFSITTTGYHWNWVRQAPGKGLEWVGYIYSSGSTSYNPSLKSRFTISRDTSKNTFYLQMNSLRAEDTAVYYCARGDWHYFDYWGQGTMVTVSSGGGGSGGGGSGGGGSGGGGSDSVTTQSPLSLPVTLGQPASISCSGEKLSDKYVHWYQQRPGQSPRMLIYENDRRPSGVPDRFSGSNSGNDATLKISRVEAEDVGVYFCQFWASTNSAVFGGGTKVEIK

SEQ ID NO: 486 - protein, 245 aa, synthetic construct
EIQLLESGGGLVQPGGSLRLSCAVSGFSITTTGYHWNWVRQAPGKGLEWVGYIYSSGSTSYNPSLKSRFTISRDTSKNTFYLQMNSLRAEDTAVYYCARGDWHYFDYWGQGTMVTVSSGGGGSGGGGSGGGGSGGGGSSSETTQPPSVSVSPGQTASITCSGEKLSDKYVHWYQQKPGQSPVMVIYENDRRPSGIPERFSGSNSGNTATLTISGTQAMDEADYFCQFWASTNSAVFGGGTQLTVL

SEQ ID NO: 487 - protein, 245 aa, synthetic construct
EIQLLESGGGLVQPGGSLRLSCAVSGFSITTTGYHWNWVRQAPGKGLEWVGYIYSSGSTSYNPSLKSRFTISRDTSKNTFYLQMNSLRAEDTAVYYCARGDWHYFDYWGQGTMVTVSSGGGGSGGGGSGGGGSGGGGSSSETTQPPSVSVSPGQTASITCSGEKLSDKYVHWYQQKPGQSPVMVIYENDRRPSGIPERFSGSNSGNTATLTISGTQAMDEADYFCQFWDSTASAVFGGGTQLTVL

SEQ ID NO: 488 - protein, 246 aa, synthetic construct
EIQLLESGGGLVQPGGSLRLSCAVSGFSITTTGYHWNWVRQAPGKGLEWVGYIYSSGSTSYAPSLKSRFTISRDTSKNTFYLQMNSLRAEDTAVYYCARGDWHYFDYWGQGTMVTVSSGGGGSGGGGSGGGGSGGGGSDSVTTQSPLSLPVTLGQPASISCSGEKLSDKYVHWYQQRPGQSPRMLIYENDRRPSGVPDRFSGSNSGNDATLKISRVEAEDVGVYFCQFWDSTNSAVFGGGTKVEIK

SEQ ID NO: 489 - protein, 245 aa, synthetic construct
EIQLLESGGGLVQPGGSLRLSCAVSGFSITTTGYHWNWVRQAPGKGLEWVGYIYSSGSTSYAPSLKSRFTISRDTSKNTFYLQMNSLRAEDTAVYYCARGDWHYFDYWGQGTMVTVSSGGGGSGGGGSGGGGSGGGGSSSETTQPPSVSVSPGQTASITCSGEKLSDKYVHWYQQKPGQSPVMVIYENDRRPSGIPERFSGSNSGNTATLTISGTQAMDEADYFCQFWDSTNSAVFGGGTQLTVL

SEQ ID NO: 490 - protein, 246 aa, synthetic construct
EIQLLESGGGLVQPGGSLRLSCAVSGFSITTTGYHWNWVRQAPGKGLEWVGYIYSSGSTSYAPSLKSRFTISRDTSKNTFYLQMNSLRAEDTAVYYCARGDWHYFDYWGQGTMVTVSSGGGGSGGGGSGGGGSGGGGSDSVTTQSPLSLPVTLGQPASISCSGEKLSDKYVHWYQQRPGQSPRMLIYENDRRPSGVPDRFSGSNSGNDATLKISRVEAEDVGVYFCQFWASTASAVFGGGTKVEIK

SEQ ID NO: 491 - protein, 245 aa, synthetic construct
EIQLLESGGGLVQPGGSLRLSCAVSGFSITTTGYHWNWVRQAPGKGLEWVGYIYSSGSTSYAPSLKSRFTISRDTSKNTFYLQMNSLRAEDTAVYYCARGDWHYFDYWGQGTMVTVSSGGGGSGGGGSGGGGSGGGGSSSETTQPPSVSVSPGQTASITCSGEKLSDKYVHWYQQKPGQSPVMVIYENDRRPSGIPERFSGSNSGNTATLTISGTQAMDEADYFCQFWASTASAVFGGGTQLTVL

SEQ ID NO: 492-5999 - skipped (5508 entries)

SEQ ID NO: 6000 - protein, 7 aa, synthetic construct
TGGYHWN

SEQ ID NO: 6001 - protein, 16 aa, synthetic construct
YIYSSGSTSYNPSLKS

SEQ ID NO: 6002 - protein, 8 aa, synthetic construct
GNWHYFDF

SEQ ID NO: 6003 - protein, 30 aa, synthetic construct
QIQLQESGPGLVKPSQSLSLTCSVTGFSIN

SEQ ID NO: 6004 - protein, 14 aa, synthetic construct
WIRQFPGKKLEWMG

SEQ ID NO: 6005 - protein, 32 aa, synthetic construct
RISITRDTSKNQFFLQLNSVTTEDTATYYCAR

SEQ ID NO: 6006 - protein, 11 aa, synthetic construct
WGQGTMVTVSS

SEQ ID NO: 6007 - protein, 7 aa, synthetic construct
TGGYHWN

SEQ ID NO: 6008 - protein, 16 aa, synthetic construct
YIYSSGTTRYNPSLKS

SEQ ID NO: 6009 - protein, 8 aa, synthetic construct
GNWHYFDY

SEQ ID NO: 6010 - protein, 30 aa, synthetic construct; identical to SEQ ID NO: 6003

SEQ ID NO: 6011 - protein, 14 aa, synthetic construct
WIRQFPGKKLEWMG

SEQ ID NO: 6012 - protein, 32 aa, synthetic construct
RISITRDTSKNQFFLQLNSVTPEDTATYYCTR

SEQ ID NO: 6013 - protein, 11 aa, synthetic construct
WGQGTLVAVSS

SEQ ID NO: 6014 - protein, 30 aa, synthetic construct
QIQLQESGPGLVKPSETLSLTCTVSGFSIN

SEQ ID NO: 6015 - protein, 14 aa, synthetic construct
WIRQPAGKGLEWIG

SEQ ID NO: 6016 - protein, 32 aa, synthetic construct
RVTMSRDTSKNQFSLKLSSVTAADTAVYYCAR

SEQ ID NO: 6017 - protein, 11 aa, synthetic construct
WGQGTMVTVSS

SEQ ID NO: 6018 - protein, 30 aa, synthetic construct
QIQLQESGPGLVKPSQTLSLTCTVSGFSIN

SEQ ID NO: 6019 - protein, 14 aa, synthetic construct
WIRQHPGKGLEWIG

SEQ ID NO: 6020 - protein, 32 aa, synthetic construct
LVTISRDTSKNQFSLKLSSVTAADTAVYYCAR

SEQ ID NO: 6021 - protein, 11 aa, synthetic construct
WGQGTMVTVSS

SEQ ID NO: 6022 - protein, 30 aa, synthetic construct
EIQLLESGGGLVQPGGSLRLSCAVSGFSIN

SEQ ID NO: 6023 - protein, 14 aa, synthetic construct
WVRQAPGKGLEWVG

SEQ ID NO: 6024 - protein, 32 aa, synthetic construct; identical to SEQ ID NO: 378

SEQ ID NO: 6025 - protein, 11 aa, synthetic construct
WGQGTMVTVSS

SEQ ID NO: 6026 - protein, 30 aa, synthetic construct
QIQLVQSGAEVKKPGSSVKVSCKVSGFSIN

SEQ ID NO: 6027 - protein, 14 aa, synthetic construct
WVRQAPGQGLEWMG

SEQ ID NO: 6028 - protein, 32 aa, synthetic construct
RVTITRDTSTNTFYMELSSLRSEDTAVYYCAR

SEQ ID NO: 6029 - protein, 11 aa, synthetic construct
WGQGTMVTVSS

SEQ ID NO: 6030 - protein, 30 aa, synthetic construct
EIQLVESGGGLVQPGGSLRLSCAVSGFSIN

SEQ ID NO: 6031 - skipped

SEQ ID NO: 6032 - protein, 14 aa, synthetic construct
WVRQAPGKGLEWVG

SEQ ID NO: 6033 - protein, 32 aa, synthetic construct
RFTISRDTAKNSFYLQMNSLRAEDTAVYYCAR

SEQ ID NO: 6034 - protein, 11 aa, synthetic construct
WGQGTMVTVSS

SEQ ID NO: 6035 - protein, 30 aa, synthetic construct
QIQLVQSGAEVKKPGASVKVSCKVSGFSIN

SEQ ID NO: 6036 - protein, 14 aa, synthetic construct
WVRQAPGQGLEWMG

SEQ ID NO: 6037 - protein, 32 aa, synthetic construct
RVTMTRDTSTNTFYMELSSLRSEDTAVYYCAR

SEQ ID NO: 6038 - protein, 11 aa, synthetic construct
WGQGTMVTVSS

SEQ ID NO: 6039 - protein, 30 aa, synthetic construct; identical to SEQ ID NO: 6018

SEQ ID NO: 6040 - protein, 14 aa, synthetic construct
WIRQHPGKGLEWIG

SEQ ID NO: 6041 - protein, 32 aa, synthetic construct; identical to SEQ ID NO: 6020

SEQ ID NO: 6042 - protein, 11 aa, synthetic construct
WGQGTLVTVSS

SEQ ID NO: 6043 - protein, 30 aa, synthetic construct; identical to SEQ ID NO: 6014

SEQ ID NO: 6044 - protein, 14 aa, synthetic construct
WIRQPAGKGLEWIG

SEQ ID NO: 6045 - protein, 32 aa, synthetic construct; identical to SEQ ID NO: 6016

SEQ ID NO: 6046 - protein, 11 aa, synthetic construct
WGQGTLVTVSS

SEQ ID NO: 6047 - protein, 30 aa, synthetic construct; identical to SEQ ID NO: 6022

SEQ ID NO: 6048 - protein, 14 aa, synthetic construct
WVRQAPGKGLEWVG

SEQ ID NO: 6049 - protein, 32 aa, synthetic construct; identical to SEQ ID NO: 378

SEQ ID NO: 6050 - protein, 11 aa, synthetic construct
WGQGTLVTVSS

SEQ ID NO: 6051 - protein, 30 aa, synthetic construct
QIQLVESGGGLVKPGGSLRLSCAVSGFSIN

SEQ ID NO: 6052 - protein, 14 aa, synthetic construct
WIRQAPGKGLEWVG

SEQ ID NO: 6053 - protein, 32 aa, synthetic construct; identical to SEQ ID NO: 6033

SEQ ID NO: 6054 - protein, 11 aa, synthetic construct
WGQGTLVTVSS

SEQ ID NO: 6055 - protein, 30 aa, synthetic construct; identical to SEQ ID NO: 6035

SEQ ID NO: 6056 - protein, 14 aa, synthetic construct
WVRQAPGQGLEWMG

SEQ ID NO: 6057 - protein, 32 aa, synthetic construct; identical to SEQ ID NO: 6037

SEQ ID NO: 6058 - protein, 11 aa, synthetic construct
WGQGTLVTVSS

SEQ ID NO: 6059 - protein, 30 aa, synthetic construct
EIQLVQSGAEVKKPGATVKISCKVSGFSIN

SEQ ID NO: 6060 - protein, 14 aa, synthetic construct
WVQQAPGKGLEWMG

SEQ ID NO: 6061 - protein, 32 aa, synthetic construct; identical to SEQ ID NO: 6028

SEQ ID NO: 6062 - protein, 11 aa, synthetic construct
WGQGTLVTVSS

SEQ ID NO: 6063 - protein, 11 aa, synthetic construct
SGERLSDKYVH

SEQ ID NO: 6064 - protein, 7 aa, synthetic construct
ENDKRPS

SEQ ID NO: 6065 - skipped

SEQ ID NO: 6066 - protein, 22 aa, synthetic construct
SYTLTQPPLLSVALGHKATITC

SEQ ID NO: 6067 - protein, 15 aa, synthetic construct
WYQQKPGRAPVMVIY

SEQ ID NO: 6068 - skipped

SEQ ID NO: 6069 - protein, 10 aa, synthetic construct
FGSGTQLTVL

SEQ ID NO: 6070 - protein, 11 aa, synthetic construct
SGENLSDKYVH

SEQ ID NO: 6071 - protein, 7 aa, synthetic construct
ENEKRPS

SEQ ID NO: 6072 - protein, 10 aa, synthetic construct
HYWESINSVV

SEQ ID NO: 6073 - protein, 22 aa, synthetic construct
SYTLTQPPSLSVAPGQKATIIC

SEQ ID NO: 6074 - protein, 15 aa, synthetic construct
WYQQKPGRAPVMVIY

SEQ ID NO: 6075 - protein, 32 aa, synthetic construct
GIPDQFSGSNSGNIATLTISKAQPGSEADYYC

SEQ ID NO: 6076 - protein, 10 aa, synthetic construct
FGSGTHLTVL

SEQ ID NO: 6077 - protein, 22 aa, synthetic construct
QSVTTQPPSVSGAPGQRVTISC

SEQ ID NO: 6078 - protein, 15 aa, synthetic construct
WYQQLPGTAPKMLIY

SEQ ID NO: 6079 - protein, 32 aa, synthetic construct
GVPDRFSGSNSGNSASLAITGLQAEDEADYYC

SEQ ID NO: 6080 - protein, 10 aa, synthetic construct
FGGGTQLTVL

SEQ ID NO: 6081 - protein, 22 aa, synthetic construct
QSVTTQPPSASGTPGQRVTISC

SEQ ID NO: 6082 - protein, 15 aa, synthetic construct
WYQQLPGTAPKMLIY

SEQ ID NO: 6083 - protein, 32 aa, synthetic construct
GVPDRFSGSNSGNSASLAISGLQSEDEADYYC

SEQ ID NO: 6084 - protein, 10 aa, synthetic construct
FGGGTQLTVL

SEQ ID NO: 6085 - protein, 22 aa, synthetic construct
QSVTTQPPSASGTPGQRVTISC

SEQ ID NO: 6086 - protein, 15 aa, synthetic construct
WYQQLPGTAPKMLIY

SEQ ID NO: 6087 - protein, 32 aa, synthetic construct
GVPDRFSGSNSGNSASLAISGLRSEDEADYYC

SEQ ID NO: 6088 - protein, 10 aa, synthetic construct
FGGGTQLTVL

SEQ ID NO: 6089 - protein, 22 aa, synthetic construct
SSETTQPHSVSVATAQMARITC

SEQ ID NO: 6090 - protein, 15 aa, synthetic construct
WYQQKPGQDPVMVIY

SEQ ID NO: 6091 - protein, 32 aa, synthetic construct
GIPERFSGSNPGNTATLTISRIEAGDEADYYC

SEQ ID NO: 6092 - protein, 10 aa, synthetic construct
FGGGTQLTVL

SEQ ID NO: 6093 - protein, 23 aa, synthetic construct
DIQMTQSPSTLSASVGDRVTITC

SEQ ID NO: 6094 - protein, 15 aa, synthetic construct
WYQQKPGKAPKMLIY

SEQ ID NO: 6095 - protein, 32 aa, synthetic construct
GVPSRFSGSNSGNEATLTISSLQPDDFATYYC

SEQ ID NO: 6096 - protein, 10 aa, synthetic construct
FGQGTKVEIK

SEQ ID NO: 6097 - protein, 22 aa, synthetic construct
QYVLTQPPSASGTPGQRVTISC

SEQ ID NO: 6098 - protein, 15 aa, synthetic construct
WYQQLPGTAPKMLIY

SEQ ID NO: 6099 - protein, 32 aa, synthetic construct; identical to SEQ ID NO: 6083

SEQ ID NO: 6100 - protein, 10 aa, synthetic construct
FGEGTELTVL

SEQ ID NO: 6101 - protein, 22 aa, synthetic construct
QYVLTQPPSASGTPGQRVTISC

SEQ ID NO: 6102 - protein, 15 aa, synthetic construct
WYQQLPGTAPKMLIY

SEQ ID NO: 6103 - protein, 32 aa, synthetic construct; identical to SEQ ID NO: 6087

SEQ ID NO: 6104 - protein, 10 aa, synthetic construct
FGEGTELTVL

SEQ ID NO: 6105 - protein, 22 aa, synthetic construct
SYELTQPPSVSVSPGQTASITC

SEQ ID NO: 6106 - protein, 15 aa, synthetic construct
WYQQKPGQSPVMVIY

SEQ ID NO: 6107 - protein, 32 aa, synthetic construct
GIPERFSGSNSGNTATLTISGTQAMDEADYYC

SEQ ID NO: 6108 - protein, 10 aa, synthetic construct
FGEGTELTVL

SEQ ID NO: 6109 - protein, 23 aa, synthetic construct
DYVLTQSPLSLPVTPGEPASISC

SEQ ID NO: 6110 - protein, 15 aa, synthetic construct
WYLQKPGQSPQMLIY

SEQ ID NO: 6111 - protein, 32 aa, synthetic construct
GVPDRFSGSNSGNDATLKISRVEAEDVGVYYC

SEQ ID NO: 6112 - protein, 10 aa, synthetic construct
FGQGTKVEIK

SEQ ID NO: 6113 - protein, 23 aa, synthetic construct
AYQLTQSPSSLSASVGDRVTITC

SEQ ID NO: 6114 - protein, 15 aa, synthetic construct
WYQQKPGKAPKMLIY

SEQ ID NO: 6115 - protein, 32 aa, synthetic construct
GVPSRFSGSNSGNDATLTISSLQPEDFATYYC

SEQ ID NO: 6116 - protein, 10 aa, synthetic construct
FGQGTKVEIK

SEQ ID NO: 6117 - protein, 23 aa, synthetic construct
EYVLTQSPATLSVSPGERATLSC

SEQ ID NO: 6118 - protein, 15 aa, synthetic construct
WYQQKPGQAPRMLIY

SEQ ID NO: 6119 - protein, 32 aa, synthetic construct
GIPARFSGSNSGNEATLTISSLQSEDFAVYYC

SEQ ID NO: 6120 - protein, 10 aa, synthetic construct
FGQGTKVEIK

SEQ ID NO: 6121 - protein, 118 aa, synthetic construct
QIQLQESGPGLVKPSQSLSLTCSVTGFSINTGGYHWNWIRQFPGKKLEWMGYIYSSGSTSYNPSLKSRISITRDTSKNQFFLQLNSVTTEDTATYYCARGNWHYFDFWGQGTMVTVSS

SEQ ID NO: 6122 - protein, 118 aa, synthetic construct
QIQLQESGPGLVKPSQSLSLTCSVTGFSINTGGYHWNWIRQFPGKKLEWMGYIYSSGTTRYNPSLKSRISITRDTSKNQFFLQLNSVTPEDTATYYCTRGNWHYFDYWGQGTLVAVSS

SEQ ID NO: 6123 - protein, 118 aa, synthetic construct
QIQLQESGPGLVKPSETLSLTCTVSGFSINTGGYHWNWIRQPAGKGLEWIGYIYSSGSTSYNPSLKSRVTMSRDTSKNQFSLKLSSVTAADTAVYYCARGNWHYFDFWGQGTMVTVSS

SEQ ID NO: 6124 - protein, 118 aa, synthetic construct
QIQLQESGPGLVKPSQTLSLTCTVSGFSINTGGYHWNWIRQHPGKGLEWIGYIYSSGSTSYNPSLKSLVTISRDTSKNQFSLKLSSVTAADTAVYYCARGNWHYFDFWGQGTMVTVSS

SEQ ID NO: 6125 - protein, 118 aa, synthetic construct
EIQLLESGGGLVQPGGSLRLSCAVSGFSINTGGYHWNWVRQAPGKGLEWVGYIYSSGSTSYNPSLKSRFTISRDTSKNTFYLQMNSLRAEDTAVYYCARGNWHYFDFWGQGTMVTVSS

SEQ ID NO: 6126 - protein, 118 aa, synthetic construct
QIQLVQSGAEVKKPGSSVKVSCKVSGFSINTGGYHWNWVRQAPGQGLEWMGYIYSSGSTSYNPSLKSRVTITRDTSTNTFYMELSSLRSEDTAVYYCARGNWHYFDFWGQGTMVTVSS

SEQ ID NO: 6127 - protein, 118 aa, synthetic construct
EIQLVESGGGLVQPGGSLRLSCAVSGFSINTGGYHWNWVRQAPGKGLEWVGYIYSSGSTSYNPSLKSRFTISRDTAKNSFYLQMNSLRAEDTAVYYCARGNWHYFDFWGQGTMVTVSS

SEQ ID NO: 6128 - protein, 118 aa, synthetic construct
QIQLVQSGAEVKKPGASVKVSCKVSGFSINTGGYHWNWVRQAPGQGLEWMGYIYSSGSTSYNPSLKSRVTMTRDTSTNTFYMELSSLRSEDTAVYYCARGNWHYFDFWGQGTMVTVSS

SEQ ID NO: 6129 - protein, 118 aa, synthetic construct
QIQLQESGPGLVKPSQTLSLTCTVSGFSINTGGYHWNWIRQHPGKGLEWIGYIYSSGTTRYNPSLKSLVTISRDTSKNQFSLKLSSVTAADTAVYYCARGNWHYFDYWGQGTLVTVSS

SEQ ID NO: 6130 - protein, 118 aa, synthetic construct
QIQLQESGPGLVKPSETLSLTCTVSGFSINTGGYHWNWIRQPAGKGLEWIGYIYSSGTTRYNPSLKSRVTMSRDTSKNQFSLKLSSVTAADTAVYYCARGNWHYFDYWGQGTLVTVSS

SEQ ID NO: 6131 - protein, 118 aa, synthetic construct
EIQLLESGGGLVQPGGSLRLSCAVSGFSINTGGYHWNWVRQAPGKGLEWVGYIYSSGTTRYNPSLKSRFTISRDTSKNTFYLQMNSLRAEDTAVYYCARGNWHYFDYWGQGTLVTVSS

SEQ ID NO: 6132 - protein, 118 aa, synthetic construct
QIQLVESGGGLVKPGGSLRLSCAVSGFSINTGGYHWNWIRQAPGKGLEWVGYIYSSGTTRYNPSLKSRFTISRDTAKNSFYLQMNSLRAEDTAVYYCARGNWHYFDYWGQGTLVTVSS

SEQ ID NO: 6133 - protein, 118 aa, synthetic construct
QIQLVQSGAEVKKPGASVKVSCKVSGFSINTGGYHWNWVRQAPGQGLEWMGYIYSSGTTRYNPSLKSRVTMTRDTSTNTFYMELSSLRSEDTAVYYCARGNWHYFDYWGQGTLVTVSS

SEQ ID NO: 6134 - protein, 118 aa, synthetic construct
EIQLVQSGAEVKKPGATVKISCKVSGFSINTGGYHWNWVQQAPGKGLEWMGYIYSSGTTRYNPSLKSRVTITRDTSTNTFYMELSSLRSEDTAVYYCARGNWHYFDYWGQGTLVTVSS

SEQ ID NO: 6135 - skipped

SEQ ID NO: 6136 - protein, 107 aa, synthetic construct
SYTLTQPPSLSVAPGQKATIICSGENLSDKYVHWYQQKPGRAPVMVIYENEKRPSGIPDQFSGSNSGNIATLTISKAQPGSEADYYCHYWESINSVVFGSGTHLTVL

SEQ ID NO: 6137 - protein, 107 aa, synthetic construct
QSVTTQPPSVSGAPGQRVTISCSGERLSDKYVHWYQQLPGTAPKMLIYENDKRPSGVPDRFSGSNSGNSASLAITGLQAEDEADYYCQSWDSTNSAVFGGGTQLTVL

SEQ ID NO: 6138 - protein, 107 aa, synthetic construct
QSVTTQPPSASGTPGQRVTISCSGERLSDKYVHWYQQLPGTAPKMLIYENDKRPSGVPDRFSGSNSGNSASLAISGLQSEDEADYYCQSWDSTNSAVFGGGTQLTVL

SEQ ID NO: 6139 - protein, 107 aa, synthetic construct
QSVTTQPPSASGTPGQRVTISCSGERLSDKYVHWYQQLPGTAPKMLIYENDKRPSGVPDRFSGSNSGNSASLAISGLRSEDEADYYCQSWDSTNSAVFGGGTQLTVL

SEQ ID NO: 6140 - protein, 107 aa, synthetic construct
SSETTQPHSVSVATAQMARITCSGERLSDKYVHWYQQKPGQDPVMVIYENDKRPSGIPERFSGSNPGNTATLTISRIEAGDEADYYCQSWDSTNSAVFGGGTQLTVL

SEQ ID NO: 6141 - protein, 108 aa, synthetic construct
DIQMTQSPSTLSASVGDRVTITCSGERLSDKYVHWYQQKPGKAPKMLIYENDKRPSGVPSRFSGSNSGNEATLTISSLQPDDFATYYCQSWDSTNSAVFGQGTKVEIK

SEQ ID NO: 6142 - protein, 107 aa, synthetic construct
QYVLTQPPSASGTPGQRVTISCSGENLSDKYVHWYQQLPGTAPKMLIYENEKRPSGVPDRFSGSNSGNSASLAISGLQSEDEADYYCHYWESINSVVFGEGTELTVL

SEQ ID NO: 6143 - protein, 107 aa, synthetic construct
QYVLTQPPSASGTPGQRVTISCSGENLSDKYVHWYQQLPGTAPKMLIYENEKRPSGVPDRFSGSNSGNSASLAISGLRSEDEADYYCHYWESINSVVFGEGTELTVL

SEQ ID NO: 6144 - protein, 107 aa, synthetic construct
SYELTQPPSVSVSPGQTASITCSGENLSDKYVHWYQQKPGQSPVMVIYENEKRPSGIPERFSGSNSGNTATLTISGTQAMDEADYYCHYWESINSVVFGEGTELTVL

SEQ ID NO: 6145 - protein, 108 aa, synthetic construct
DYVLTQSPLSLPVTPGEPASISCSGENLSDKYVHWYLQKPGQSPQMLIYENEKRPSGVPDRFSGSNSGNDATLKISRVEAEDVGVYYCHYWESINSVVFGQGTKVEIK

SEQ ID NO: 6146 - protein, 108 aa, synthetic construct
AYQLTQSPSSLSASVGDRVTITCSGENLSDKYVHWYQQKPGKAPKMLIYENEKRPSGVPSRFSGSNSGNDATLTISSLQPEDFATYYCHYWESINSVVFGQGTKVEIK

SEQ ID NO: 6147 - protein, 108 aa, synthetic construct
EYVLTQSPATLSVSPGERATLSCSGENLSDKYVHWYQQKPGQAPRMLIYENEKRPSGIPARFSGSNSGNEATLTISSLQSEDFAVYYCHYWESINSVVFGQGTKVEIK

SEQ ID NO: 6148 - protein, 448 aa, synthetic construct
QIQLQESGPGLVKPSQSLSLTCSVTGFSINTGGYHWNWIRQFPGKKLEWMGYIYSSGSTSYNPSLKSRISITRDTSKNQFFLQLNSVTTEDTATYYCARGNWHYFDFWGQGTMVTVSSASTKGPSVFPLAPSSKSTSGGTAALGCLVKDYFPEPVTVSWNSGALTSGVHTFPAVLQSSGLYSLSSVVTVPSSSLGTQTYICNVNHKPSNTKVDKRVEPKSCDKTHTCPPCPAPELLGGPSVFLFPPKPKDTLMISRTPEVTCVVVDVSHEDPEVKFNWYVDGVEVHNAKTKPREEQYASTYRVVSVLTVLHQDWLNGKEYKCKVSNKALPAPIEKTISKAKGQPREPQVCTLPPSREEMTKNQVSLSCAVKGFYPSDIAVEWESNGQPENNYKTTPPVLDSDGSFFLVSKLTVDKSRWQQGNVFSCSVMHEALHNHYTQKSLSLSPGK

SEQ ID NO: 6149 - protein, 448 aa, synthetic construct
QIQLQESGPGLVKPSQSLSLTCSVTGFSINTGGYHWNWIRQFPGKKLEWMGYIYSSGSTSYNPSLKSRISITRDTSKNQFFLQLNSVTTEDTATYYCARGNWHYFDFWGQGTMVTVSSASTKGPSVFPLAPSSKSTSGGTAALGCLVKDYFPEPVTVSWNSGALTSGVHTFPAVLQSSGLYSLSSVVTVPSSSLGTQTYICNVNHKPSNTKVDKRVEPKSCDKTHTCPPCPAPELLGGPSVFLFPPKPKDTLMISRTPEVTCVVVDVSHEDPEVKFNWYVDGVEVHNAKTKPREEQYNSTYRVVSVLTVLHQDWLNGKEYKCKVSNKALPAPIEKTISKAKGQPREPQVCTLPPSREEMTKNQVSLSCAVKGFYPSDIAVEWESNGQPENNYKTTPPVLDSDGSFFLVSKLTVDKSRWQQGNVFSCSVMHEALHNHYTQKSLSLSPGK

SEQ ID NO: 6150 - protein, 213 aa, synthetic construct
SYTLTQPPLLSVALGHKATITCSGERLSDKYVHWYQQKPGRAPVMVIYENDKRPSGIPDQFSGSNSGNIATLTISKAQAGYEADYYCQSWDSTNSAVFGSGTQLTVLGQPKANPTVTLFPPSSEELQANKATLVCLISDFYPGAVTVAWKADGSPVKAGVETTKPSKQSNNKYAASSYLSLTPEQWKSHRSYSCQVTHEGSTVEKTVAPTECS

SEQ ID NO: 6151 - protein, 448 aa, synthetic construct
QIQLQESGPGLVKPSQSLSLTCSVTGFSINTGGYHWNWIRQFPGKKLEWMGYIYSSGTTRYNPSLKSRISITRDTSKNQFFLQLNSVTPEDTATYYCTRGNWHYFDYWGQGTLVAVSSASTKGPSVFPLAPSSKSTSGGTAALGCLVKDYFPEPVTVSWNSGALTSGVHTFPAVLQSSGLYSLSSVVTVPSSSLGTQTYICNVNHKPSNTKVDKRVEPKSCDKTHTCPPCPAPELLGGPSVFLFPPKPKDTLMISRTPEVTCVVVDVSHEDPEVKFNWYVDGVEVHNAKTKPREEQYASTYRVVSVLTVLHQDWLNGKEYKCKVSNKALPAPIEKTISKAKGQPREPQVCTLPPSREEMTKNQVSLSCAVKGFYPSDIAVEWESNGQPENNYKTTPPVLDSDGSFFLVSKLTVDKSRWQQGNVFSCSVMHEALHNHYTQKSLSLSPGK

SEQ ID NO: 6152 - protein, 448 aa, synthetic construct
QIQLQESGPGLVKPSQSLSLTCSVTGFSINTGGYHWNWIRQFPGKKLEWMGYIYSSGTTRYNPSLKSRISITRDTSKNQFFLQLNSVTPEDTATYYCTRGNWHYFDYWGQGTLVAVSSASTKGPSVFPLAPSSKSTSGGTAALGCLVKDYFPEPVTVSWNSGALTSGVHTFPAVLQSSGLYSLSSVVTVPSSSLGTQTYICNVNHKPSNTKVDKRVEPKSCDKTHTCPPCPAPELLGGPSVFLFPPKPKDTLMISRTPEVTCVVVDVSHEDPEVKFNWYVDGVEVHNAKTKPREEQYNSTYRVVSVLTVLHQDWLNGKEYKCKVSNKALPAPIEKTISKAKGQPREPQVCTLPPSREEMTKNQVSLSCAVKGFYPSDIAVEWESNGQPENNYKTTPPVLDSDGSFFLVSKLTVDKSRWQQGNVFSCSVMHEALHNHYTQKSLSLSPGK

SEQ ID NO: 6153 - protein, 213 aa, synthetic construct
SYTLTQPPSLSVAPGQKATIICSGENLSDKYVHWYQQKPGRAPVMVIYENEKRPSGIPDQFSGSNSGNIATLTISKAQPGSEADYYCHYWESINSVVFGSGTHLTVLGQPKANPTVTLFPPSSEELQANKATLVCLISDFYPGAVTVAWKADGSPVKAGVETTKPSKQSNNKYAASSYLSLTPEQWKSHRSYSCQVTHEGSTVEKTVAPTECS

SEQ ID NO: 6154 - protein, 454 aa, synthetic construct
EVRLQQSGPDLIKPGASVKMSCKASGYTFTGYVMHWVKQRPGQGLEWIGFINPYNDDIQSNERFRGKATLTSDKSSTTAYMELSSLTSEDSAVYYCARGAGYNFDGAYRFFDFWGQGTTLTVSSASTKGPSVFPLAPSSKSTSGGTAALGCLVKDYFPEPVTVSWNSGALTSGVHTFPAVLQSSGLYSLSSVVTVPSSSLGTQTYICNVNHKPSNTKVDKRVEPKSCDKTHTCPPCPAPELLGGPSVFLFPPKPKDTLMISRTPEVTCVVVDVSHEDPEVKFNWYVDGVEVHNAKTKPREEQYASTYRVVSVLTVLHQDWLNGKEYKCKVSNKALPAPIEKTISKAKGQPREPQVYTLPPCREEMTKNQVSLWCLVKGFYPSDIAVEWESNGQPENNYKTTPPVLDSDGSFFLYSKLTVDKSRWQQGNVFSCSVMHEALHNHYTQKSLSLSPGK

SEQ ID NO: 6155 - protein, 454 aa, synthetic construct
EVRLQQSGPDLIKPGASVKMSCKASGYTFTGYVMHWVKQRPGQGLEWIGFINPYNDDIQSNERFRGKATLTSDKSSTTAYMELSSLTSEDSAVYYCARGAGYNFDGAYRFFDFWGQGTTLTVSSASTKGPSVFPLAPSSKSTSGGTAALGCLVKDYFPEPVTVSWNSGALTSGVHTFPAVLQSSGLYSLSSVVTVPSSSLGTQTYICNVNHKPSNTKVDKRVEPKSCDKTHTCPPCPAPELLGGPSVFLFPPKPKDTLMISRTPEVTCVVVDVSHEDPEVKFNWYVDGVEVHNAKTKPREEQYNSTYRVVSVLTVLHQDWLNGKEYKCKVSNKALPAPIEKTISKAKGQPREPQVYTLPPCREEMTKNQVSLWCLVKGFYPSDIAVEWESNGQPENNYKTTPPVLDSDGSFFLYSKLTVDKSRWQQGNVFSCSVMHEALHNHYTQKSLSLSPGK

SEQ ID NO: 6156 - protein, 219 aa, synthetic construct
DVVMTQSPLSLPVSLGDQASISCRSSQRLVHSNGNTYLHWYLQKPGQSPKLLIYRVSNRFPGVPDRFSGSGSGTDFTLKISRVEAEDLGIYFCSQSTHVPYTFGGGTKLEIKRTVAAPSVFIFPPSDEQLKSGTASVVCLLNNFYPREAKVQWKVDNALQSGNSQESVTEQDSKDSTYSLSSTLTLSKADYEKHKVYACEVTHQGLSSPVTKSFNRGEC

SEQ ID NO: 6157 - protein, 440 aa, synthetic construct
METDTLLLWVLLLWVPGSTGDYKDDDDKGGGGSGTGGAAAHITGTRGRSNTLSSPNSKNEKALGRKINSWESSRSGHSFLSNLHLRNGELVIHEKGFYYIYSQTYFRFQEEIKENTKNDKQMVQYIYKYTSYPDPILLMKSARNSCWSKDAEYGLYSIYQGGIFELKENDRIFVSVTNEHLIDMDHEASFFGAFAVSGSGNGTSNGTSGSSGGDKTHTCPPCPAPELLGGPSVFLFPPKPKDTLMISRTPEVTCVVVDVSHEDPEVKFNWYVDGVEVHNAKTKPREEQYNSTYRVVSVLTVLHQDWLNGKEYKCKVSNKALPAPIEKTISKAKGQPREPQVYTLPPCREEMTKNQVSLWCLVKGFYPSDIAVEWESNGQPENNYKTTPPVLDSDGSFFLYSKLTVDKSRWQQGNVFSCSVMHEALHNHYTQKSLSLSPGK

SEQ ID NO: 6158 - protein, 601 aa, synthetic construct
METDTLLLWVLLLWVPGSTGDYKDDDDKGGGGSGTGGAAAHITGTRGRSNTLSSPNSKNEKALGRKINSWESSRSGHSFLSNLHLRNGELVIHEKGFYYIYSQTYFRFQEEIKENTKNDKQMVQYIYKYTSYPDPILLMKSARNSCWSKDAEYGLYSIYQGGIFELKENDRIFVSVTNEHLIDMDHEASFFGAFAVSGAAAHITGTRGRSNTLSSPNSKNEKALGRKINSWESSRSGHSFLSNLHLRNGELVIHEKGFYYIYSQTYFRFQEEIKENTKNDKQMVQYIYKYTSYPDPILLMKSARNSCWSKDAEYGLYSIYQGGIFELKENDRIFVSVTNEHLIDMDHEASFFGAFAVSGSGNGTSNGTSGSSGGDKTHTCPPCPAPELLGGPSVFLFPPKPKDTLMISRTPEVTCVVVDVSHEDPEVKFNWYVDGVEVHNAKTKPREEQYNSTYRVVSVLTVLHQDWLNGKEYKCKVSNKALPAPIEKTISKAKGQPREPQVYTLPPCREEMTKNQVSLWCLVKGFYPSDIAVEWESNGQPENNYKTTPPVLDSDGSFFLYSKLTVDKSRWQQGNVFSCSVMHEALHNHYTQKSLSLSPGK

SEQ ID NO: 6159 - protein, 762 aa, synthetic construct
METDTLLLWVLLLWVPGSTGDYKDDDDKGGGGSGTGGAAAHITGTRGRSNTLSSPNSKNEKALGRKINSWESSRSGHSFLSNLHLRNGELVIHEKGFYYIYSQTYFRFQEEIKENTKNDKQMVQYIYKYTSYPDPILLMKSARNSCWSKDAEYGLYSIYQGGIFELKENDRIFVSVTNEHLIDMDHEASFFGAFAVSGAAAHITGTRGRSNTLSSPNSKNEKALGRKINSWESSRSGHSFLSNLHLRNGELVIHEKGFYYIYSQTYFRFQEEIKENTKNDKQMVQYIYKYTSYPDPILLMKSARNSCWSKDAEYGLYSIYQGGIFELKENDRIFVSVTNEHLIDMDHEASFFGAFAVSGAAAHITGTRGRSNTLSSPNSKNEKALGRKINSWESSRSGHSFLSNLHLRNGELVIHEKGFYYIYSQTYFRFQEEIKENTKNDKQMVQYIYKYTSYPDPILLMKSARNSCWSKDAEYGLYSIYQGGIFELKENDRIFVSVTNEHLIDMDHEASFFGAFAVSGSGNGTSNGTSGSSGGDKTHTCPPCPAPELLGGPSVFLFPPKPKDTLMISRTPEVTCVVVDVSHEDPEVKFNWYVDGVEVHNAKTKPREEQYNSTYRVVSVLTVLHQDWLNGKEYKCKVSNKALPAPIEKTISKAKGQPREPQVYTLPPCREEMTKNQVSLWCLVKGFYPSDIAVEWESNGQPENNYKTTPPVLDSDGSFFLYSKLTVDKSRWQQGNVFSCSVMHEALHNHYTQKSLSLSPGK

SEQ ID NO: 6160 - protein, 444 aa, synthetic construct
METDTLLLWVLLLWVPGSTGTSEETISTVQEKQQNISPLVRERGPQRVAAHITGTRGRSNTLSSPNSKNEKALGRKINSWESSRSGHSFLSNLHLRNGELVIHEKGFYYIYSQTYFRFQEEIKENTKNDKQMVQYIYKYTSYPDPILLMKSARNSCWSKDAEYGLYSIYQGGIFELKENDRIFVSVTNEHLIDMDHEASFFGAFLVGGGGGSGGGGSDKTHTCPPCPAPELLGGPSVFLFPPKPKDTLMISRTPEVTCVVVDVSHEDPEVKFNWYVDGVEVHNAKTKPREEQYNSTYRVVSVLTVLHQDWLNGKEYKCKVSNKALPAPIEKTISKAKGQPREPQVYTLPPCREEMTKNQVSLWCLVKGFYPSDIAVEWESNGQPENNYKTTPPVLDSDGSFFLYSKLTVDKSRWQQGNVFSCSVMHEALHNHYTQKSLSLSPGK

SEQ ID NO: 6161 - protein, 642 aa, synthetic construct
METDTLLLWVLLLWVPGSTGTSEETISTVQEKQQNISPLVRERGPQRVAAHITGTRGRSNTLSSPNSKNEKALGRKINSWESSRSGHSFLSNLHLRNGELVIHEKGFYYIYSQTYFRFQEEIKENTKNDKQMVQYIYKYTSYPDPILLMKSARNSCWSKDAEYGLYSIYQGGIFELKENDRIFVSVTNEHLIDMDHEASFFGAFLVGGGGGSGGGGSGTSEETISTVQEKQQNISPLVRERGPQRVAAHITGTRGRSNTLSSPNSKNEKALGRKINSWESSRSGHSFLSNLHLRNGELVIHEKGFYYIYSQTYFRFQEEIKENTKNDKQMVQYIYKYTSYPDPILLMKSARNSCWSKDAEYGLYSIYQGGIFELKENDRIFVSVTNEHLIDMDHEASFFGAFLVGGGGGSGGGGSDKTHTCPPCPAPELLGGPSVFLFPPKPKDTLMISRTPEVTCVVVDVSHEDPEVKFNWYVDGVEVHNAKTKPREEQYNSTYRVVSVLTVLHQDWLNGKEYKCKVSNKALPAPIEKTISKAKGQPREPQVYTLPPCREEMTKNQVSLWCLVKGFYPSDIAVEWESNGQPENNYKTTPPVLDSDGSFFLYSKLTVDKSRWQQGNVFSCSVMHEALHNHYTQKSLSLSPGK

SEQ ID NO: 6162 - protein, 840 aa, synthetic construct
METDTLLLWVLLLWVPGSTGTSEETISTVQEKQQNISPLVRERGPQRVAAHITGTRGRSNTLSSPNSKNEKALGRKINSWESSRSGHSFLSNLHLRNGELVIHEKGFYYIYSQTYFRFQEEIKENTKNDKQMVQYIYKYTSYPDPILLMKSARNSCWSKDAEYGLYSIYQGGIFELKENDRIFVSVTNEHLIDMDHEASFFGAFLVGGGGGSGGGGSGTSEETISTVQEKQQNISPLVRERGPQRVAAHITGTRGRSNTLSSPNSKNEKALGRKINSWESSRSGHSFLSNLHLRNGELVIHEKGFYYIYSQTYFRFQEEIKENTKNDKQMVQYIYKYTSYPDPILLMKSARNSCWSKDAEYGLYSIYQGGIFELKENDRIFVSVTNEHLIDMDHEASFFGAFLVGGGGGSGGGGSGTSEETISTVQEKQQNISPLVRERGPQRVAAHITGTRGRSNTLSSPNSKNEKALGRKINSWESSRSGHSFLSNLHLRNGELVIHEKGFYYIYSQTYFRFQEEIKENTKNDKQMVQYIYKYTSYPDPILLMKSARNSCWSKDAEYGLYSIYQGGIFELKENDRIFVSVTNEHLIDMDHEASFFGAFLVGGGGGSGGGGSDKTHTCPPCPAPELLGGPSVFLFPPKPKDTLMISRTPEVTCVVVDVSHEDPEVKFNWYVDGVEVHNAKTKPREEQYNSTYRVVSVLTVLHQDWLNGKEYKCKVSNKALPAPIEKTISKAKGQPREPQVYTLPPCREEMTKNQVSLWCLVKGFYPSDIAVEWESNGQPENNYKTTPPVLDSDGSFFLYSKLTVDKSRWQQGNVFSCSVMHEALHNHYTQKSLSLSPGK

SEQ ID NO: 6163 - protein, 502 aa, synthetic construct
METDTLLLWVLLLWVPGSTGEVQLVESGGGLVQPGGSLRLSCAASGFTFSSYVMSWVRQAPGKGLEWVATISSGGSYTYYPDSVKGRFTISRDNAKNTLYLQMNSLRAEDTAVYYCARRGDSMITTDYWGQGTLVTVSSGGGGSGGGGSGGGGSGGGGSDIQMTQSPSSLSASVGDRVTITCKASQDVGTAVAWYQQKPGKAPKLLIYWASTRHTGVPSRFSGSGSGTDFTLTISSLQPEDFATYYCQQYSSYRTFGQGTKVEIKGGGGSGGGGSDKTHTCPPCPAPELLGGPSVFLFPPKPKDTLMISRTPEVTCVVVDVSHEDPEVKFNWYVDGVEVHNAKTKPREEQYNSTYRVVSVLTVLHQDWLNGKEYKCKVSNKALPAPIEKTISKAKGQPREPQVYTLPPCREEMTKNQVSLWCLVKGFYPSDIAVEWESNGQPENNYKTTPPVLDSDGSFFLYSKLTVDKSRWQQGNVFSCSVMHEALHNHYTQKSLSLSPGK

SEQ ID NO: 6164 - protein, 505 aa, synthetic construct
METDTLLLWVLLLWVPGSTGEVQLVQSGGGVERPGGSLRLSCAASGFTFDDYAMSWVRQAPGKGLEWVSGINWQGGSTGYADSVKGRVTISRDNAKNSLYLQMNSLRAEDTAVYYCAKILGAGRGWYFDYWGKGTTVTVSSGGGGSGGGGSGGGGSGGGGSSELTQDPAVSVALGQTVRITCSGDSLRSYYASWYQQKPGQAPVLVIYGANNRPSGIPDRFSGSSSGNTASLTITGAQAEDEADYYCNSADSSGNHVVFGGGTKLTVLGGGGSGGGGSDKTHTCPPCPAPELLGGPSVFLFPPKPKDTLMISRTPEVTCVVVDVSHEDPEVKFNWYVDGVEVHNAKTKPREEQYNSTYRVVSVLTVLHQDWLNGKEYKCKVSNKALPAPIEKTISKAKGQPREPQVYTLPPCREEMTKNQVSLWCLVKGFYPSDIAVEWESNGQPENNYKTTPPVLDSDGSFFLYSKLTVDKSRWQQGNVFSCSVMHEALHNHYTQKSLSLSPGK

SEQ ID NO: 6165 - protein, 508 aa, synthetic construct
METDTLLLWVLLLWVPGSTGQVQLQESGPGLVKPSQTLSLTCTVSGGSISSGDYFWSWIRQLPGKGLEWIGHIHNSGTTYYNPSLKSRVTISVDTSKKQFSLRLSSVTAADTAVYYCARDRGGDYYYGMDVWGQGTTVTVSSGGGGSGGGGSGGGGSGGGGSEIVLTQSPGTLSLSPGERATLSCRASQGISRSYLAWYQQKPGQAPSLLIYGASSRATGIPDRFSGSGSGTDFTLTISRLEPEDFAVYYCQQFGSSPWTFGQGTKVEIKRGGGGSGGGGSDKTHTCPPCPAPELLGGPSVFLFPPKPKDTLMISRTPEVTCVVVDVSHEDPEVKFNWYVDGVEVHNAKTKPREEQYNSTYRVVSVLTVLHQDWLNGKEYKCKVSNKALPAPIEKTISKAKGQPREPQVYTLPPCREEMTKNQVSLWCLVKGFYPSDIAVEWESNGQPENNYKTTPPVLDSDGSFFLYSKLTVDKSRWQQGNVFSCSVMHEALHNHYTQKSLSLSPGK

SEQ ID NO: 6166 - skipped

SEQ ID NO: 6167 - protein, 474 aa, synthetic construct
METDTLLLWVLLLWVPGSTGQVQLVQSGAEVKKPGSSVKVSCKASGYTFTGYVMHWVRQAPGQGLEWMGFINPYNDDIQSNERFRGRVTITSDKSTTTAYMELSSLRSEDTAVYYCARGAGYNFDGAYRFFDFWGQGTLVTVSSASTKGPSVFPLAPSSKSTSGGTAALGCLVKDYFPEPVTVSWNSGALTSGVHTFPAVLQSSGLYSLSSVVTVPSSSLGTQTYICNVNHKPSNTKVDKRVEPKSCDKTHTCPPCPAPELLGGPSVFLFPPKPKDTLMISRTPEVTCVVVDVSHEDPEVKFNWYVDGVEVHNAKTKPREEQYNSTYRVVSVLTVLHQDWLNGKEYKCKVSNKALPAPIEKTISKAKGQPREPQVCTLPPSREEMTKNQVSLSCAVKGFYPSDIAVEWESNGQPENNYKTTPPVLDSDGSFFLVSKLTVDKSRWQQGNVFSCSVMHEALHNHYTQKSLSLSPGK

SEQ ID NO: 6168 - protein, 474 aa, synthetic construct
METDTLLLWVLLLWVPGSTGQVQLVQSGAEVKKPGSSVKVSCKASGYTFTGYVMHWVRQAPGQGLEWMGFINPYNDDIQSNERFRGRVTITSDKSTTTAYMELSSLRSEDTAVYYCARGAGYNFDGAYRFFDFWGQGTLVTVSSASTKGPSVFPLAPSSKSTSGGTAALGCLVKDYFPEPVTVSWNSGALTSGVHTFPAVLQSSGLYSLSSVVTVPSSSLGTQTYICNVNHKPSNTKVDKRVEPKSCDKTHTCPPCPAPELLGGPSVFLFPPKPKDTLMISRTPEVTCVVVDVSHEDPEVKFNWYVDGVEVHNAKTKPREEQYNSTYRVVSVLTVLHQDWLNGKEYKCKVSNKALPAPIEKTISKAKGQPREPQVYTLPPSREEMTKNQVSLTCLVKGFYPSDIAVEWESNGQPENNYKTTPPVLDSDGSFFLYSKLTVDKSRWQQGNVFSCSVMHEALHNHYTQKSLSLSPGK

SEQ ID NO: 6169 - protein, 239 aa, synthetic construct
METDTLLLWVLLLWVPGSTGDVVMTQSPLSLPVTLGQPASISCRSSQRLVHSNGNTYLHWYQQRPGQSPRLLIYRVSNRFPGVPDRFSGSGSGTDFTLKISRVEAEDVGVYFCSQSTHVPYTFGGGTKVEIKRTVAAPSVFIFPPSDEQLKSGTASVVCLLNNFYPREAKVQWKVDNALQSGNSQESVTEQDSKDSTYSLSSTLTLSKADYEKHKVYACEVTHQGLSSPVTKSFNRGEC

SEQ ID NO: 6170 - protein, 499 aa, synthetic construct
METDTLLLWVLLLWVPGSTGDVVMTQSPLSLPVTPGEPASISCRSSQRLVHSNGNTYLHWYLQKPGQSPQLLIYRVSNRFPGVPDRFSGSGSGTDFTLKISRVEAEDVGVYFCSQSTHVPYTFGGGTKVEIKRTVAAPSVFIFPPSDEQLKSGTASVVCLLNNFYPREAKVQWKVDNALQSGNSQESVTEQDSKDSTYSLSSTLTLSKADYEKHKVYACEVTHQGLSSPVTKSFNRGECGGGGSGGGGSGGGGSEVQLVESGGGLVQPGGSLRLSCAASGFTFSSYVMSWVRQAPGKGLEWVATISSGGSYTYYPDSVKGRFTISRDNAKNTLYLQMNSLRAEDTAVYYCARRGDSMITTDYWGQGTLVTVSSGGGGSGGGGSGGGGSGGGGSDIQMTQSPSSLSASVGDRVTITCKASQDVGTAVAWYQQKPGKAPKLLIYWASTRHTGVPSRFSGSGSGTDFTLTISSLQPEDFATYYCQQYSSYRTFGQGTKVEIK

SEQ ID NO: 6171 - protein, 505 aa, synthetic construct
METDTLLLWVLLLWVPGSTGDVVMTQSPLSLPVTPGEPASISCRSSQRLVHSNGNTYLHWYLQKPGQSPQLLIYRVSNRFPGVPDRFSGSGSGTDFTLKISRVEAEDVGVYFCSQSTHVPYTFGGGTKVEIKRTVAAPSVFIFPPSDEQLKSGTASVVCLLNNFYPREAKVQWKVDNALQSGNSQESVTEQDSKDSTYSLSSTLTLSKADYEKHKVYACEVTHQGLSSPVTKSFNRGECGGGGSGGGGSGGGGSQVQLQESGPGLVKPSQTLSLTCTVSGGSISSGDYFWSWIRQLPGKGLEWIGHIHNSGTTYYNPSLKSRVTISVDTSKKQFSLRLSSVTAADTAVYYCARDRGGDYYYGMDVWGQGTTVTVSSGGGGSGGGGSGGGGSGGGGSEIVLTQSPGTLSLSPGERATLSCRASQGISRSYLAWYQQKPGQAPSLLIYGASSRATGIPDRFSGSGSGTDFTLTISRLEPEDFAVYYCQQFGSSPWTFGQGTKVEIKR

SEQ ID NO: 6172 - protein, 502 aa, synthetic construct
METDTLLLWVLLLWVPGSTGDVVMTQSPLSLPVTPGEPASISCRSSQRLVHSNGNTYLHWYLQKPGQSPQLLIYRVSNRFPGVPDRFSGSGSGTDFTLKISRVEAEDVGVYFCSQSTHVPYTFGGGTKVEIKRTVAAPSVFIFPPSDEQLKSGTASVVCLLNNFYPREAKVQWKVDNALQSGNSQESVTEQDSKDSTYSLSSTLTLSKADYEKHKVYACEVTHQGLSSPVTKSFNRGECGGGGSGGGGSGGGGSEVQLVQSGGGVERPGGSLRLSCAASGFTFDDYAMSWVRQAPGKGLEWVSGINWQGGSTGYADSVKGRVTISRDNAKNSLYLQMNSLRAEDTAVYYCAKILGAGRGWYFDYWGKGTTVTVSSGGGGSGGGGSGGGGSGGGGSSELTQDPAVSVALGQTVRITCSGDSLRSYYASWYQQKPGQAPVLVIYGANNRPSGIPDRFSGSSSGNTASLTITGAQAEDEADYYCNSADSSGNHVVFGGGTKLTVL

SEQ ID NO: 6173 - protein, 597 aa, synthetic construct
METDTLLLWVLLLWVPGSTGQVQLVQSGAEVKKPGSSVKVSCKASGYTFTGYVMHWVRQAPGQGLEWMGFINPYNDDIQSNERFRGRVTITSDKSTTTAYMELSSLRSEDTAVYYCARGAGYNFDGAYRFFDFWGQGTLVTVSSGSASAPTLFPLVSCENSPSDTSSVAVGCLAQDFLPDSITFSWKYKNNSDISSTRGFPSVLRGGKYAATSQVLLPSKDVMQGTDEHVVCKVQHPNGNKEKNVPLPVIAELPPKVSVFVPPRDGFFGNPRKSKLICQATGFSPRQIQVSWLREGKQVGSGVTTDQVQAEAKESGPTTYKVTSTLTIKESDWLGQSMFTCRVDHRGLTFQQNASSMCVPDQDTAIRVFAIPPSFASIFLTKSTKLTCLVTDLTTYDSVTISWTRQNGEAVKTHTNISESHPNATFSAVGEASICEDDWNSGERFTCTVTHTDLPSPLKQTISRPKGVALHRPDVYLLPPAREQLNLRESATITCLVTGFSPADVFVQWMQRGQPLSPEKYVTSAPMPEPQAPGRYFAHSILTVSEEEWNTGETYTCVVAHEALPNRVTERTVDKSTGKPTLYNVSLVMSDTAGTCY

SEQ ID NO: 6174 - protein, 159 aa, synthetic construct
MKNHLLFWGVLAVFIKAVHVKAQEDERIVLVDNKCKCARITSRIIRSSEDPNEDIVERNIRIIVPLNNRENISDPTSPLRTRFVYHLSDLCKKCDPTEVELDNQIVTATQSNICDEDSATETCYTYDRNKCYTAVVPLVYGGETKMVETALTPDACYPD

SEQ ID NO: 6175 - protein, 243 aa, synthetic construct
QVHLQESGPGLVKPSETLSLTCTVSDDSISSYYWSWIRQPPGKGLEWIGHISYSGSANYNPSLKSRVTISVDTSKNQFSLKLSSVTAADTAVYYCANWDDAFNIWGQGTMVTVSSGGGGSGGGGSGGGGSGGGGSEIVLTQSPGTLSLSPGERATLSCRASQSVSSSYLAWYQQKPGQAPRLLIYGASSRATGIPDRFSGSGSGTDFTLTISRLEPEDFAVYYCQQYGSSPWTFGQGTKVEIK

SEQ ID NO: 6176 - protein, 115 aa, synthetic construct
QVHLQESGPGLVKPSETLSLTCTVSDDSISSYYWSWIRQPPGKGLEWIGHISYSGSANYNPSLKSRVTISVDTSKNQFSLKLSSVTAADTAVYYCANWDDAFNIWGQGTMVTVSS

SEQ ID NO: 6177 - protein, 108 aa, synthetic construct
EIVLTQSPGTLSLSPGERATLSCRASQSVSSSYLAWYQQKPGQAPRLLIYGASSRATGIPDRFSGSGSGTDFTLTISRLEPEDFAVYYCQQYGSSPWTFGQGTKVEIK

SEQ ID NO: 6178 - protein, 250 aa, synthetic construct
EVQLVQSGAEVKEPGESLKISCKNSGYSFTNYWVGWVRQMPGKGLEWMGIIYPGDSDTRYSPSFQGQVTISADKSINTAYLQWSSLKASDTAMYYCGRLTMFRGIIIGYFDYWGQGTLVTVSSGGGGSGGGGSGGGGSGGGGSEIVLTQSPATLSLSPGERATLSCRASQSVSSYLAWYQQKPGQAPRLLIYDASNRATGIPARFSGSGSGTDFTLTISSLEPEDFAVYYCQQRSNWPWTFGQGTKVEIK

SEQ ID NO: 6179 - protein, 123 aa, synthetic construct
EVQLVQSGAEVKEPGESLKISCKNSGYSFTNYWVGWVRQMPGKGLEWMGIIYPGDSDTRYSPSFQGQVTISADKSINTAYLQWSSLKASDTAMYYCGRLTMFRGIIIGYFDYWGQGTLVTVSS

SEQ ID NO: 6180 - protein, 107 aa, synthetic construct
EIVLTQSPATLSLSPGERATLSCRASQSVSSYLAWYQQKPGQAPRLLIYDASNRATGIPARFSGSGSGTDFTLTISSLEPEDFAVYYCQQRSNWPWTFGQGTKVEIK

SEQ ID NO: 6181 - protein, 247 aa, synthetic construct
QVQLQQSGPELVKPGASVKMSCKASGYTFTDYVINWGKQRSGQGLEWIGEIYPGSGTNYYNEKFKAKATLTADKSSNIAYMQLSSLTSEDSAVYFCARRGRYGLYAMDYWGQGTSVTVSSGGGGSGGGGSGGGGSGGGGSDIQMTQTTSSLSASLGDRVTISCRASQDISNYLNWYQQKPDGTVKLLIYYTSRLHSGVPSRFSGSGSGTDYSLTINNLEQEDIATYFCQQGNTRPWTFGGGTKLEIK

SEQ ID NO: 6182 - protein, 120 aa, synthetic construct
QVQLQQSGPELVKPGASVKMSCKASGYTFTDYVINWGKQRSGQGLEWIGEIYPGSGTNYYNEKFKAKATLTADKSSNIAYMQLSSLTSEDSAVYFCARRGRYGLYAMDYWGQGTSVTVSS

SEQ ID NO: 6183 - protein, 107 aa, synthetic construct
DIQMTQTTSSLSASLGDRVTISCRASQDISNYLNWYQQKPDGTVKLLIYYTSRLHSGVPSRFSGSGSGTDYSLTINNLEQEDIATYFCQQGNTRPWTFGGGTKLEIK

SEQ ID NO: 6184 - protein, 239 aa, synthetic construct
EVQLVESGGGVVRPGGSLRLSCAASGFTFDDYGMSWVRQAPGKGLEWVSGINWNGGSTGYADSVKGRFTISRDNAKNSLYLQMNSLRAEDTAVYYCARGRSLLFDYWGQGTLVTVSRGGGGSGGGGSGGGGSSELTQDPAVSVALGQTVRITCQGDSLRSYYASWYQQKPGQAPVLVIYGKNNRPSGIPDRFSGSSSGNTASLTITGAQAEDEADYYCNSRDSSGNHVVFGGGTKLTVL

SEQ ID NO: 6185 - protein, 117 aa, synthetic construct
EVQLVESGGGVVRPGGSLRLSCAASGFTFDDYGMSWVRQAPGKGLEWVSGINWNGGSTGYADSVKGRFTISRDNAKNSLYLQMNSLRAEDTAVYYCARGRSLLFDYWGQGTLVTVSR

SEQ ID NO: 6186 - protein, 108 aa, synthetic construct
SSELTQDPAVSVALGQTVRITCQGDSLRSYYASWYQQKPGQAPVLVIYGKNNRPSGIPDRFSGSSSGNTASLTITGAQAEDEADYYCNSRDSSGNHVVFGGGTKLTVL

SEQ ID NO: 6187 - protein, 245 aa, synthetic construct
QIQLQESGPGLVKPSQSLSLTCSVTGFSINTGGYHWNWIRQFPGKKLEWMGYIYSSGSTSYNPSLKSRISITRDTSKNQFFLQLNSVTTEDTATYYCARGNWHYFDFWGQGTMVTVSSGGGGSGGGGSGGGGSGGGGSSYTLTQPPLLSVALGHKATITCSGERLSDKYVHWYQQKPGRAPVMVIYENDKRPSGIPDQFSGSNSGNIATLTISKAQAGYEADYYCQSWDSTNSAVFGSGTQLTVL

SEQ ID NO: 6188 - protein, 245 aa, synthetic construct
SYTLTQPPLLSVALGHKATITCSGERLSDKYVHWYQQKPGRAPVMVIYENDKRPSGIPDQFSGSNSGNIATLTISKAQAGYEADYYCQSWDSTNSAVFGSGTQLTVLGGGGSGGGGSGGGGSGGGGSQIQLQESGPGLVKPSQSLSLTCSVTGFSINTGGYHWNWIRQFPGKKLEWMGYIYSSGSTSYNPSLKSRISITRDTSKNQFFLQLNSVTTEDTATYYCARGNWHYFDFWGQGTMVTVSS

SEQ ID NO: 6189 - protein, 245 aa, synthetic construct
QIQLQESGPGLVKPSQSLSLTCSVTGFSINTGGYHWNWIRQFPGKKLEWMGYIYSSGTTRYNPSLKSRISITRDTSKNQFFLQLNSVTPEDTATYYCTRGNWHYFDYWGQGTLVAVSSGGGGSGGGGSGGGGSGGGGSSYTLTQPPSLSVAPGQKATIICSGENLSDKYVHWYQQKPGRAPVMVIYENEKRPSGIPDQFSGSNSGNIATLTISKAQPGSEADYYCHYWESINSVVFGSGTHLTVL

SEQ ID NO: 6190 - protein, 245 aa, synthetic construct
SYTLTQPPSLSVAPGQKATIICSGENLSDKYVHWYQQKPGRAPVMVIYENEKRPSGIPDQFSGSNSGNIATLTISKAQPGSEADYYCHYWESINSVVFGSGTHLTVLGGGGSGGGGSGGGGSGGGGSQIQLQESGPGLVKPSQSLSLTCSVTGFSINTGGYHWNWIRQFPGKKLEWMGYIYSSGTTRYNPSLKSRISITRDTSKNQFFLQLNSVTPEDTATYYCTRGNWHYFDYWGQGTLVAVSS

SEQ ID NO: 6191 - protein, 227 aa, synthetic construct
EVRLQQSGPDLIKPGASVKMSCKASGYTFTGYVMHWVKQRPGQGLEWIGFINPYNDDIQSNERFRGKATLTSDKSSTTAYMELSSLTSEDSAVYYCARGAGYNFDGAYRFFDFWGQGTTLTVSSASTKGPSVFPLAPSSKSTSGGTAALGCLVKDYFPEPVTVSWNSGALTSGVHTFPAVLQSSGLYSLSSVVTVPSSSLGTQTYICNVNHKPSNTKVDKRVEPKSC

SEQ ID NO: 6192-7016 - skipped (825 entries)

SEQ ID NO: 7017 - protein, 114 aa, Homo sapiens
NWVNVISDLKKIEDLIQSMHIDATLYTESDVHPSCKVTAMKCFLLELQVISLESGDASIHDTVENLIILANNSLSSNGNVTESGCKECEELEEKNIKEFLQSFVHIVQMFINTS

SEQ ID NO: 7018 - protein, 77 aa, synthetic construct
MAPRRARGCRTLGLPALLLLLLLRPPATRGITCPPPMSVEHADIWVKSYSLYSRERYICNSGFKRKAGTSSLTECVL

SEQ ID NO: 7019 - protein, 20 aa, synthetic construct
SGGSGGGGSGGGSGGGGSLQ

SEQ ID NO: 7020 - protein, 133 aa, Homo sapiens [sequence omitted]

SEQ ID NO: 7021 - protein, 157 aa, Homo sapiens
YFGKLESKLSVIRNLNDQVLFIDQGNRPLFEDMTDSDCRDNAPRTIFIISMYKDSQPRGMAVTISVKCEKISTLSCENKIISFKEMNPPDNIKDTKSDIIFFQRSVPGHDNKMQFESSSYEGYFLACEKERDLFKLILKKEDELGDRSIMFTVQNED

SEQ ID NO: 7022 - protein, 133 aa, Homo sapiens [sequence omitted]

SEQ ID NO: 7023 - protein, 138 aa, Homo sapiens
QDPYVKEAENLKKYFNAGHSDVADNGTLFLGILKNWKEESDRKIMQSQIVSFYFKLFKNFKDDQSIQKSVETIKEDMNVKFFNSNKKKRDDFEKLTNYSVTDLNVQRKAIHELIQVMAELSPAAKTGKRKRSQMLFRG

SEQ ID NO: 7024-7226 - skipped (203 entries)

SEQ ID NO: 7227 - protein, 133 aa, unidentified
  source 1..133: note = IL-2 cytokine sequence
APTSSSTKKTQLQLEHLLLDLQMILNGINNYKNPKLTRMLTFKFYMPKKATELKHLQCLEEELKPLEEVLNLAQSKNFHLRPRDLISNINVIVLELKGSETTFMCEYADETATIVEFLNRWITFAQSIISTLT

SEQ ID NO: 7228 - protein, 133 aa, unidentified
  source 1..133: note = IL-2 cytokine sequence
APASSSTKKTQLQLEHLLLDLQMILNGINNYKNPKLTRMLTAKFAMPKKATELKHLQCLEEELKPLEEVLNGAQSKNFHLRPRDLISNINVIVLELKGSETTFMCEYADETATIVEFLNRWITFAQSIISTLT

SEQ ID NO: 7229 - protein, 518 aa, synthetic construct
IWELKKDVYVVELDWYPDAPGEMVVLTCDTPEEDGITWTLDQSSEVLGSGKTLTIQVKEFGDAGQYTCHKGGEVLSHSLLLLHKKEDGIWSTDILKDQKEPKNKTFLRCEAKNYSGRFTCWWLTTISTDLTFSVKSSRGSSDPQGVTCGAATLSAERVRGDNKEYEYSVECQEDSACPAAEESLPIEVMVDAVHKLKYENYTSSFFIRDIIKPDPPKNLQLKPLKNSRQVEVSWEYPDTWSTPHSYFSLTFCVQVQGKSKREKKDRVFTDKTSATVICRKNASISVRAQDRYYSSSWSEWASVPCSGGGGSGGGGSGGGGSRNLPVATPDPGMFPCLHHSQNLLRAVSNMLQKARQTLEFYPCTSEEIDHEDITKDKTSTVEACLPLELTKNESCLNSRETSFITNGSCLASRKTSFMMALCLSSIYEDLKMYQVEFKTMNAKLLMDPKRQIFLDQNMLAVIDELMQALNFNSETVPQKSSLEEPDFYKTKIKLCILLHAFRIRAVTIDRVMSYLNAS

SEQ ID NO: 7230 - protein, 340 aa, synthetic construct
SPGQGTQSENSCTHFPGNLPNMLRDLRDAFSRVKTFFQMKDQLDNLLLKESLLEDFKGYLGCQALSEMIQFYLEEVMPQAENQDPDIKAHVNSLGENLKTLRLRLRRCHRFLPCENKSKAVEQVKNAFNKLQEKGIYKAMSEFDIFINYIEAYMTMKIRNGGGGSGGGGSGGGGSGGGGSSPGQGTQSENSCTHFPGNLPNMLRDLRDAFSRVKTFFQMKDQLDNLLLKESLLEDFKGYLGCQALSEMIQFYLEEVMPQAENQDPDIKAHVNSLGENLKTLRLRLRRCHRFLPCENKSKAVEQVKNAFNKLQEKGIYKAMSEFDIFINYIEAYMTMKIRN

SEQ ID NO: 7231 - protein, 166 aa, synthetic construct
SPGQGTQSENSCTHFPGNLPNMLRDLRDAFSRVKTFFQMKDQLDNLLLKESLLEDFKGYLGCQALSEMIQFYLEEVMPQAENQDPDIKAHVNSLGENLKTLRLRLRRCHRFLPCENGGGSGGKSKAVEQVKNAFNKLQEKGIYKAMSEFDIFINYIEAYMTMKIRN

SEQ ID NO: 7232 - protein, 114 aa, synthetic construct
NWVNVISDLKKIEDLIQSMHIDATLYTESDVHPSCKVTAMKCFLLELQVISLASGDASIHDTVENLIILANNSLSSNGAVTESGCKECEELEEKNIKEFLQSFVHIVQMFINTS

SEQ ID NO: 7233 - protein, 238 aa, unidentified
  source 1..238: note = B7-6 sequence
DLKVEMMAGGTQITPLNDNVTIFCNIFYSQPLNITSMGITWFWKSLTFDKEVKVFEFFGDHQEAFRPGAIVSPWRLKSGDASLRLPGIQLEEAGEYRCEVVVTPLKAQGTVQLEVVASPASRLLLDQVGMKENEDKYMCESSGFYPEAINITWEKQTQKFPHPIEISEDVITGPTIKNMDGTFNVTSCLKLNSSQEDPGTVYQCVVRHASLHTPLRSNFTLTAARHSLSETEKTDNFS

SEQ ID NO: 7234 - protein, 284 aa, unidentified
  source 1..284: note = MICA sequence
EPHSLRYNLTVLSWDGSVQSGFLTEVHLDGQPFLRCDRQKCRAKPQGQWAEDVLGNKTWDRETRDLTGNGKDLRMTLAHIKDQKEGLHSLQEIRVCEIHEDNSTRSSQHFYYDGELFLSQNLETKEWTMPQSSRAQTLAMNVRNFLKEDAMKTKTHYHAMHADCLQELRRYLKSGVVLRRTVPPMVNVTRSEASEGNITVTCRASGFYPWNITLSWRQDGVSLSHDTQQWGDVLPDGNGTYQTWVATRICQGEEQRFTCYMEHSGNHSTHPVPSGKVLVLQSHW

SEQ ID NO: 7235 - protein, 287 aa, unidentified
  source 1..287: note = MICB sequence
AEPHSLRYNLMVLSQDESVQSGFLAEGHLDGQPFLRYDRQKRRAKPQGQWAEDVLGAKTWDTETEDLTENGQDLRRTLTHIKDQKGGLHSLQEIRVCEIHEDSSTRGSRHFYYDGELFLSQNLETQESTVPQSSRAQTLAMNVTNFWKEDAMKTKTHYRAMQADCLQKLQRYLKSGVAIRRTVPPMVNVTCSEVSEGNITVTCRASSFYPRNITLTWRQDGVSLSHNTQQWGDVLPDGNGTYQTWVATRIRQGEEQRFTCYMEHSGNHGTHPVPSGKVLVLQSQRTD

SEQ ID NO: 7236 - protein, 191 aa, unidentified
  source 1..191: note = ULBP1 sequence
GWVDTHCLCYDFIITPKSRPEPQWCEVQGLVDERPFLHYDCVNHKAKAFASLGKKVNVTKTWEEQTETLRDVVDFLKGQLLDIQVENLIPIEPLTLQARMSCEHEAHGHGRGSWQFLFNGQKFLLFDSNNRKWTALHPGAKKMTEKWEKNRDVTMFFQKISLGDCKMWLEEFLMYWEQMLDPTKPPSLAPG

SEQ ID NO: 7237 - protein, 329 aa, unidentified
  source 1..329: note = NECTIN2 sequence
QDVRVQVLPEVRGQLGGTVELPCHLLPPVPGLYISLVTWQRPDAPANHQNVAAFHPKMGPSFPSPKPGSERLSFVSAKQSTGQDTEAELQDATLALHGLTVEDEGNYTCEFATFPKGSVRGMTWLRVIAKPKNQAEAQKVTFSQDPTTVALCISKEGRPPARISWLSSLDWEAKETQVSGTLAGTVTVTSRFTLVPSGRADGVTVTCKVEHESFEEPALIPVTLSVRYPPEVSISGYDDNWYLGRTDATLSCDVRSNPEPTGYDWSTTSGTFPTSAVAQGSQLVIHAVDSLFNTTFVCTVTNAVGMGRAEQVIFVRETPNTAGAGATGG

SEQ ID NO: 7238 - protein, 323 aa, unidentified
  source 1..323: note = NECL5 sequence
WPPPGTGDVVVQAPTQVPGFLGDSVTLPCYLQVPNMEVTHVSQLTWARHGESGSMAVFHQTQGPSYSESKRLEFVAARLGAELRNASLRMFGLRVEDEGNYTCLFVTFPQGSRSVDIWLRVLAKPQNTAEVQKVQLTGEPVPMARCVSTGGRPPAQITWHSDLGGMPNTSQVPGFLSGTVTVTSLWILVPSSQVDGKNVTCKVEHESFEKPQLLTVNLTVYYPPEVSISGYDNNWYLGQNEATLTCDARSNPEPTGYNWSTTMGPLPPFAVAQGAQLLIRPVDKPINTTLICNVTNALGARQAELTVQVKEGPPSEHSGISRN

SEQ ID NO: 7239 - protein, 330 aa, unidentified
  source 1..330: note = NECL2 sequence
QNLFTKDVTVIEGEVATISCQVNKSDDSVIQLLNPNRQTIYFRDFRPLKDSRFQLLNFSSSELKVSLTNVSISDEGRYFCQLYTDPPQESYTTITVLVPPRNLMIDIQKDTAVEGEEIEVNCTAMASKPATTIRWFKGNTELKGKSEVEEWSDMYTVTSQLMLKVHKEDDGVPVICQVEHPAVTGNLQTQRYLEVQYKPQVHIQMTYPLQGLTREGDALELTCEAIGKPQPVMVTWVRVDDEMPQHAVLSGPNLFINNLNKTDNGTYRCEASNIVGKAHSDYMLYVYDPPTTIPPPTTTTTTTTTTTTTILTIITDSRAGEEGSIRAVDH

SEQ ID NO: 7240 - protein, 155 aa, unidentified
  source 1..155: note = CD70 sequence
QRFAQAQQQLPLESLGWDVAELQLNHTGPQQDPRLYWQGGPALGRSFLHGPELDKGQLRIHRDGIYMVHIQVTLAICSSTTASRHHPTTLAVGICSPASRSISLLRLSFHQGCTIASQRLTPLARGDTLCTNLTGTLLPSRNTDETFFGVQWVRP

SEQ ID NO: 7241 - protein, 294 aa, unidentified
  source 1..294: note = L-selectin sequence
WTYHYSEKPMNWQRARRFCRDNYTDLVAIQNKAEIEYLEKTLPFSRSYYWIGIRKIGGIWTWVGTNKSLTEEAENWGDGEPNNKKNKEDCVEIYIKRNKDAGKWNDDACHKLKAALCYTASCQPWSCSGHGECVEIINNYTCNCDVGYYGPQCQFVIQCEPLEAPELGTMDCTHPLGNFSFSSQCAFSCSEGTNLTGIEETTCGPFGNWSSPEPTCQVIQCEPLSAPDLGIMNCSHPLASFSFTSACTFICSEGTELIGKKKTICESSGIWSNPSPICQKLDKSFSMIKEGDYN

SEQ ID NO: 7242 - protein, 243 aa, unidentified
  source 1..243: note = CD72 sequence
RYLQVSQQLQQTNRVLEVTNSSLRQQLRLKITQLGQSAEDLQGSRRELAQSQEALQVEQRAHQAAEGQLQACQADRQKTKETLQSEEQQRRALEQKLSNMENRLKPFFTCGSADTCCPSGWIMHQKSCFYISLTSKNWQESQKQCETLSSKLATFSEIYPQSHSYYFLNSLLPNGGSGNSYWTGLSSNKDWKLTDDTQRTRTYAQSSKCNKVHKTWSWWTLESESCRSSLPYICEMTAFRFPD

SEQ ID NO: 7243 - protein, 124 aa, unidentified
  source 1..124: note = CLEC2B sequence
KLTRDSQSLCPYDWIGFQNKCYYFSKEEGDWNSSKYNCSTQHADLTIIDNIEEMNFLRRYKCSSDHWIGLKMAKNRTGQWVDGATFTKSFGMRGSEGCAYLSDDGAATARCYTERKWICRKRIH

SEQ ID NO: 7244 - protein, 194 aa, unidentified
  source 1..194: note = CD48 sequence
QGHLVHMTVVSGSNVTLNISESLPENYKQLTWFYTFDQKIVEWDSRKSKYFESKFKGRVRLDPQSGALYISKVQKEDNSTYIMRVLKKTGNEQEWKIKLQVLDPVPKPVIKIEKIEDMDDNCYLKLSCVIPGESVNYTWYGDKRPFPKELQNSVLETTLMPHNYSRCYTCQVSNSVSSKNGTVCLSPPCTLARS

SEQ ID NO: 7245 - protein, 133 aa, unidentified
  source 1..133: note = OX40L sequence
QVSHRYPRIQSIKVQFTEYKKEKGFILTSQKEDEIMKVQNNSVIINCDGFYLISLKGYFSQEVNISLHYQKDEEPLFQLKKVRSVNSLMVASLTYKDKVYLNVTTDNTSLDDFHVNGGELILIHQNPGEFCVL

SEQ ID NO: 7246 - protein, 149 aa, unidentified
  source 1..149: note = CD40L sequence
MQKGDQNPQIAAHVISEASSKTTSVLQWAEKGYYTMSNNLVTLENGKQLTVKRQGLYYIYAQVTFCSNREASSQAPFIASLCLKSPGRFERILLRAANTHSSAKPCGQQSIHLGGVFELQPGASVFVNVTDPSQVSHGTGFTSFGLLKL

SEQ ID NO: 7247 - protein, 205 aa, unidentified
  source 1..205: note = 41BB sequence
ACPWAVSGARASPGSAASPRLREGPELSPDDPAGLLDLRQGMFAQLVAQNVLLIDGPLSWYSDPGLAGVSLTGGLSYKEDTKELVVAKAGVYYVFFQLELRRVVAGEGSGSVSLALHLQPLRSAAGAAALALTVDLPPASSEARNSAFGFQGRLLHLSAGQRLGVHLHTEARARHAWQLTQGATVLGLFRVTPEIPAGLPSPRSE

SEQ ID NO: 7248 - protein, 455 aa, unidentified
  source 1..455: note = rHuPH20 sequence
LNFRAPPVIPNVPFLWAWNAPSEFCLGKFDEPLDMSLFSFIGSPRINATGQGVTIFYVDRLGYYPYIDSITGVTVNGGIPQKISLQDHLDKAKKDITFYMPVDNLGMAVIDWEEWRPTWARNWKPKDVYKNRSIELVQQQNVQLSLTEATEKAKQEFEKAGKDFLVETIKLGKLLRPNHLWGYYLFPDCYNHHYKKPGYNGSCFNVEIKRNDDLSWLWNESTALYPSIYLNTQQSPVAATLYVRNRVREAIRVSKIPDAKSPLPVFAYTRIVFTDQVLKFLSQDELVYTFGETVALGASGIVIWGTLSIMRSMKSCLLLDNYMETILNPYIINVTLAAKMCSQVLCQEQGVCIRKNWNSSDYLHLNPDNFAIQLEKGGKFTVRGKPTLEDLEQFSEKFYCSCYSTLSCKEKADVKDTDAVDVCIADGVCIDAFLKPPMETEEPQIFYNASPSTLS

SEQ ID NO: 7249 - protein, 5 aa, synthetic construct
GGGGS

SEQ ID NO: 7250 - protein, 10 aa, synthetic construct
GGGGSGGGGS

SEQ ID NO: 7251 - protein, 15 aa, synthetic construct
GGGGSGGGGSGGGGS

SEQ ID NO: 7252 - protein, 17 aa, synthetic construct
DVPSGPGGGGGSGGGGS

SEQ ID NO: 7253 - protein, 413 aa, unidentified
  source 1..413: note = HYAL1 sequence
FRGPLLPNRPFTTVWNANTQWCLERHGVDVDVSVFDVVANPGQTFRGPDMTIFYSSQGTYPYYTPTGEPVFGGLPQNASLIAHLARTFQDILAAIPAPDFSGLAVIDWEAWRPRWAFNWDTKDIYRQRSRALVQAQHPDWPAPQVEAVAQDQFQGAARAWMAGTLQLGRALRPRGLWGFYGFPDCYNYDFLSPNYTGQCPSGIRAQNDQLGWLWGQSRALYPSIYMPAVLEGTGKSQMYVQHRVAEAFRVAVAAGDPNLPVLPYVQIFYDTTNHFLPLDELEHSLGESAAQGAAGVVLWVSWENTRTKESCQAIKEYMDTTLGPFILNVTSGALLCSQALCSGHGRCVRRTSHPKALLLLNPASFSIQLTPGGGPLSLRGALSLEDQAQMAVEFKCRCYPGWQAPWCERKSMW

SEQ ID NO: 7254 - protein, 551 aa, unidentified
  source 1..551: note = collagenase molecule IV sequence
YNFFPRKPKWDKNQITYRIIGYTPDLDPETVDDAFARAFQVWSDVTPLRFSRIHDGEADIMINFGRWEHGDGYPFDGKDGLLAHAFAPGTGVGGDSHFDDDELWTLGEGQVVRVKYGNADGEYCKFPFLFNGKEYNSCTDTGRSDGFLWCSTTYNFEKDGKYGFCPHEALFTMGGNAEGQPCKFPFRFQGTSYDSCTTEGRTDGYRWCGTTEDYDRDKKYGFCPETAMSTVGGNSEGAPCVFPFTFLGNKYESCTSAGRSDGKMWCATTANYDDDRKWGFCPDQGYSLFLVAAHEFGHAMGLEHSQDPGALMAPIYTYTKNFRLSQDDIKGIQELYGASPDIDLGTGPTPTLGPVTPEICKQDIVFDGIAQIRGEIFFFKDRFIWRTVTPRDKPMGPLLVATFWPELPEKIDAVYEAPQEEKAVFFAGNEYWIYSASTLERGYPKPLTSLGLPPDVQRVDAAFNWSKNKKTYIFAGDKFWRYNEVKKKMDPGFPKLIADAWNAIPDNLDAVVDLQGGGHSYFFKGAYYLKLENQSLKSVKFGSIKSDWLGC

SEQ ID NO: 7255 - protein, 27 aa, synthetic construct
  VARIANT 2..26: note = EAAAK repeats may be deleted
AEAAAKEAAAKEAAAKEAAAKEAAAKA

SEQ ID NO: 7256 - protein, 455 aa, unidentified; identical to SEQ ID NO: 7248
  source 1..455: note = hyaluronidase sequence

SEQ ID NO: 7257-7291 - skipped (35 entries)

SEQ ID NO: 7292 - protein, 32 aa, synthetic construct
GIPDQFSGSNSGNIATLTISKAQAGYEADYYC

SEQ ID NO: 7293 - protein, 10 aa, synthetic construct
QSWDSTNSAV

SEQ ID NO: 7294 - protein, 107 aa, synthetic construct
SYTLTQPPLLSVALGHKATITCSGERLSDKYVHWYQQKPGRAPVMVIYENDKRPSGIPDQFSGSNSGNIATLTISKAQAGYEADYYCQSWDSTNSAVFGSGTQLTVL

SEQ ID NO: 7295 - protein, 118 aa, synthetic construct
QIQLQESGPGLVKPSQSLSLSCSVTGFSINTGGYHWNWIRQFPGKKVEWMGYIYSSGTTKYNPSLKSRISITRDTSKNQFFLQLNSVTTEDTATYYCARGDWHYFDYWGQGTMVAVSS

SEQ ID NO: 7296 - protein, 107 aa, synthetic construct
SYTLTQPPLVSVALGQKATIICSGENLSDKYVHWYQQKPGRAPVMVIYENDKRPSGIPDQFSGSNSGNIATLTISKAQAGYEADYYCHCWDSTNSAVFGSGTHLTVL

SEQ ID NO: 7297 - protein, 118 aa, synthetic construct
QIQLQESGPGLVKPSQSLSLTCSVTGFSINTGGYHWNWIRQFPGKKLEWMGYIYSSGSTRYNPSLKSRFSITRDTSKNQFFLQLNSVTTEDTATYYCTRGNWHYFDYWGQGTLVAVSS

SEQ ID NO: 7298 - protein, 118 aa, synthetic construct
QIQLQESGPGLVKPSQSLSLSCSVTGFSITTTGYHWNWIRQFPGKKLEWMGYIYSSGSTSYNPSLKSRFSITRDTSKNQFFLQLNSVTTEDTATYYCARGDWHYFDYWGPGTMVTVSS

SEQ ID NO: 7299 - protein, 107 aa, synthetic construct
SFTLTQPPLVSVAVGQVATITCSGEKLSDKYVHWYQQKPGRAPVMVIYENDRRPSGIPDQFSGSNSGNIASLTISKAQAGDEADYFCQFWDSTNSAVFGGGTQLTVL

SEQ ID NO: 7300 - protein, 118 aa, synthetic construct
QIQLQESGPGLVKPSQTLSLTCTVSGFSITTTGYHWNWIRQHPGKGLEWIGYIYSSGSTSYNPSLKSLVTISRDTSKNQFSLKLSSVTAADTAVYYCARGDWHYFDYWGQGTMVTVSS

SEQ ID NO: 7301 - protein, 118 aa, synthetic construct
QIQLVESGGGLVKPGGSLRLSCAVSGFSITTTGYHWNWIRQAPGKGLEWVGYIYSSGSTSYNPSLKSRFTISRDTAKNSFYLQMNSLRAEDTAVYYCARGDWHYFDYWGQGTMVTVSS

SEQ ID NO: 7302 - protein, 118 aa, synthetic construct; identical to SEQ ID NO: 357

SEQ ID NO: 7303 - protein, 118 aa, synthetic construct
EIQLVESGGGLVQPGGSLRLSCAVSGFSITTTGYHWNWVRQAPGKGLEWVGYIYSSGSTSYNPSLKSRFTISRDTAKNSFYLQMNSLRAEDTAVYYCARGDWHYFDYWGQGTMVTVSS

SEQ ID NO: 7304 - protein, 118 aa, synthetic construct
QIQLVQSGAEVKKPGASVKVSCKVSGFSITTTGYHWNWVRQAPGQGLEWMGYIYSSGSTSYNPSLKSRVTMTRDTSTNTFYMELSSLRSEDTAVYYCARGDWHYFDYWGQGTMVTVSS

SEQ ID NO: 7305 - protein, 107 aa, synthetic construct; identical to SEQ ID NO: 370

SEQ ID NO: 7306 - protein, 107 aa, synthetic construct
SSETTQPHSVSVATAQMARITCSGEKLSDKYVHWYQQKPGQDPVMVIYENDRRPSGIPERFSGSNPGNTATLTISRIEAGDEADYFCQFWDSTNSAVFGGGTQLTVL

SEQ ID NO: 7307 - protein, 107 aa, synthetic construct
QSVTTQPPSASGTPGQRVTISCSGEKLSDKYVHWYQQLPGTAPKMLIYENDRRPSGVPDRFSGSNSGNSASLAISGLRSEDEADYFCQFWDSTNSAVFGGGTQLTVL

SEQ ID NO: 7308 - protein, 107 aa, synthetic construct
QSVTTQPPSVSGAPGQRVTISCSGEKLSDKYVHWYQQLPGTAPKMLIYENDRRPSGVPDRFSGSNSGNSASLAITGLQAEDEADYFCQFWDSTNSAVFGGGTQLTVL

SEQ ID NO: 7309 - protein, 108 aa, synthetic construct; identical to SEQ ID NO: 369

SEQ ID NO: 7310 - protein, 245 aa, synthetic construct
EIQLLESGGGLVQPGGSLRLSCAVSGFSITTTGYHWNWVRQAPGKGLEWVGYIYSSGSTSYNPSLKSRFTISRDTSKNTFYLQMNSLRAEDTAVYYCARGDWHYFDYWGQGTMVTVSSGGGGSGGGGSGGGGSGGGGSSSETTQPPSVSVSPGQTASITCSGEKLSDKYVHWYQQKPGQSPVMVIYENDRRPSGIPERFSGSNSGNTATLTISGTQAMDEADYFCQFWDSTNSAVFGGGTQLTVL

SEQ ID NO: 7311 - protein, 246 aa, synthetic construct
EIQLLESGGGLVQPGGSLRLSCAVSGFSITTTGYHWNWVRQAPGKGLEWVGYIYSSGSTSYNPSLKSRFTISRDTSKNTFYLQMNSLRAEDTAVYYCARGDWHYFDYWGQGTMVTVSSGGGGSGGGGSGGGGSGGGGSDSVTTQSPLSLPVTLGQPASISCSGEKLSDKYVHWYQQRPGQSPRMLIYENDRRPSGVPDRFSGSNSGNDATLKISRVEAEDVGVYFCQFWDSTNSAVFGGGTKVEIK

SEQ ID NO: 7312 - protein, 32 aa, synthetic construct
QIQLQESGPGLVKPSQSLSLSCSVTGFSINTG

SEQ ID NO: 7313 - protein, 5 aa, synthetic construct
GYHWN

SEQ ID NO: 7314 - protein, 14 aa, synthetic construct
WIRQFPGKKVEWMG

SEQ ID NO: 7315 - protein, 8 aa, synthetic construct
GDWHYFDY

SEQ ID NO: 7316 - protein, 11 aa, synthetic construct
WGQGTMVAVSS

SEQ ID NO: 7317 - protein, 32 aa, synthetic construct
QIQLQESGPGLVKPSQSLSLTCSVTGFSINTG

SEQ ID NO: 7318 - protein, 16 aa, synthetic construct
YIYSSGSTRYNPSLKS

SEQ ID NO: 7319 - protein, 32 aa, synthetic construct
RFSITRDTSKNQFFLQLNSVTTEDTATYYCTR

SEQ ID NO: 7320 - protein, 22 aa, synthetic construct
SYTLTQPPLVSVALGQKATIIC

SEQ ID NO: 7321 - protein, 10 aa, synthetic construct
HCWDSTNSAV

SEQ ID NO: 7322 - protein, 32 aa, synthetic construct
QIQLQESGPGLVKPSQSLSLSCSVTGFSITTT

SEQ ID NO: 7323 - protein, 32 aa, synthetic construct
RFSITRDTSKNQFFLQLNSVTTEDTATYYCAR

SEQ ID NO: 7324 - protein, 11 aa, synthetic construct
WGPGTMVTVSS

SEQ ID NO: 7325 - protein, 22 aa, synthetic construct
SFTLTQPPLVSVAVGQVATITC

SEQ ID NO: 7326 - protein, 11 aa, synthetic construct
SGEKLSDKYVH

SEQ ID NO: 7327 - protein, 7 aa, synthetic construct
ENDRRPS

SEQ ID NO: 7328 - protein, 32 aa, synthetic construct
GIPDQFSGSNSGNIASLTISKAQAGDEADYFC

SEQ ID NO: 7329 - protein, 10 aa, synthetic construct
QFWDSTNSAV

SEQ ID NO: 7330 - protein, 32 aa, synthetic construct
QIQLQESGPGLVKPSQTLSLTCTVSGFSITTT

SEQ ID NO: 7331 - protein, 32 aa, synthetic construct
QIQLVESGGGLVKPGGSLRLSCAVSGFSITTT

SEQ ID NO: 7332 - protein, 32 aa, synthetic construct
EIQLLESGGGLVQPGGSLRLSCAVSGFSITTT

SEQ ID NO: 7333 - protein, 32 aa, synthetic construct
EIQLVESGGGLVQPGGSLRLSCAVSGFSITTT

SEQ ID NO: 7334 - protein, 32 aa, synthetic construct
QIQLVQSGAEVKKPGASVKVSCKVSGFSITTT

SEQ ID NO: 7335 - protein, 22 aa, synthetic construct
SSETTQPPSVSVSPGQTASITC

SEQ ID NO: 7336 - protein, 32 aa, synthetic construct; identical to SEQ ID NO: 413

SEQ ID NO: 7337 - protein, 32 aa, synthetic construct
GIPERFSGSNPGNTATLTISRIEAGDEADYFC

SEQ ID NO: 7338 - protein, 32 aa, synthetic construct
GVPDRFSGSNSGNSASLAISGLRSEDEADYFC

SEQ ID NO: 7339 - protein, 32 aa, synthetic construct
GVPDRFSGSNSGNSASLAITGLQAEDEADYFC

SEQ ID NO: 7340 - protein, 23 aa, synthetic construct
DSVTTQSPLSLPVTLGQPASISC

SEQ ID NO: 7341 - protein, 15 aa, synthetic construct
WYQQRPGQSPRMLIY

SEQ ID NO: 7342 - protein, 32 aa, synthetic construct; identical to SEQ ID NO: 385

SEQ ID NO: 7343 - protein, 124 aa, synthetic construct
QVQLVQSGAEVKKPGSSVKVSCKASGYTFTGYVMHWVRQAPGQGLEWMGFINPYNDDIQSNERFRGRVTITSDKSTTTAYMELSSLRSEDTAVYYCARGAGYNFDGAYRFFDFWGQGTTVTVSS

SEQ ID NO: 7344 - protein, 124 aa, synthetic construct
QVQLVQSGAEVKKPGASVKVSCKASGYTFTGYVMHWVRQAPGQGLEWMGFINPYNDDIQSNERFRGRVTMTSDKSITTAYMELSRLRSDDTAVYYCARGAGYNFDGAYRFFDFWGQGTTVTVSS

SEQ ID NO: 7345 - protein, 30 aa, synthetic construct
QVQLVQSGAEVKKPGSSVKVSCKASGYTFT

SEQ ID NO: 7346 - protein, 5 aa, synthetic construct
GYVMH

SEQ ID NO: 7347 - protein, 11 aa, synthetic construct
WGQGTTVTVSS

SEQ ID NO: 7348 - protein, 30 aa, synthetic construct
QVQLVQSGAEVKKPGASVKVSCKASGYTFT

SEQ ID NO: 7349 - protein, 32 aa, synthetic construct
RVTMTSDKSITTAYMELSRLRSDDTAVYYCAR

SEQ ID NO: 7350 - protein, 124 aa, synthetic construct
QVQLVQSGAEVKKPGSSVKVSCKASGYTFSGYAISWVRQAPGQGLEWMGFINPYNDDIQSNERFRGRVTITSDKSTTTAYMELSSLRSEDTAVYYCARGAGYNFDGAYRFFDFWGQGTLVTVSS

SEQ ID NO: 7351 - protein, 124 aa, synthetic construct; identical to SEQ ID NO: 261

SEQ ID NO: 7352 - protein, 124 aa, synthetic construct
QVQLVQSGAEVKKPGSSVKVSCKASGYTFSGYAISWVRQAPGQGLEWMGFIIPIFGTANYAQKFQGRVTITSDKSTTTAYMELSSLRSEDTAVYYCARGAGYNFDGAYRFFDFWGQGTLVTVSS

SEQ ID NO: 7353 - protein, 30 aa, synthetic construct
QVQLVQSGAEVKKPGSSVKVSCKASGYTFS

SEQ ID NO: 7354 - protein, 5 aa, synthetic construct
GYAIS

SEQ ID NO: 7355 - protein, 17 aa, synthetic construct
FIIPIFGTANYAQKFQG

SEQ ID NO: 7356 - skipped

SEQ ID NO: 7357 - protein, 111 aa, synthetic construct
DVVMTQSPLSLPVTLGQPASISCRSSQSLVYSDGNTYHWYQQRPGQSPRLLIYRVSNRFPGVPDRFSGSGSGTDFTLKISRVEAEDVGVYFCSQSTHVPYTFGGGTKVEIK

SEQ ID NO: 7358 - protein, 112 aa, synthetic construct
DVVMTQSPLSLPVTLGQPASISCRSSQRLVHSNGNTYLHWYQQRPGQSPRLLIYKVSNRDSGVPDRFSGSGSGTDFTLKISRVEAEDVGVYFCSQSTHVPYTFGGGTKVEIK

SEQ ID NO: 7359 - protein, 112 aa, synthetic construct
DVVMTQSPLSLPVTLGQPASISCRSSQRLVHSNGNTYLHWYQQRPGQSPRLLIYRVSNRFPGVPDRFSGSGSGTDFTLKISRVEAEDVGVYFCMQSTHWPYTFGGGTKVEIK

SEQ ID NO: 7360 - protein, 111 aa, synthetic construct
DVVMTQSPLSLPVTLGQPASISCRSSQSLVYSDGNTYHWYQQRPGQSPRLLIYKVSNRDSGVPDRFSGSGSGTDFTLKISRVEAEDVGVYFCMQSTHWPYTFGGGTKVEIK

SEQ ID NO: 7361-7366 - skipped (6 entries)

SEQ ID NO: 7367 - protein, 15 aa, synthetic construct
RSSQSLVYSDGNTYH

SEQ ID NO: 7368 - protein, 7 aa, synthetic construct
KVSNRDS

SEQ ID NO: 7369 - protein, 9 aa, synthetic construct
MQSTHWPYT

SEQ ID NO: 7370 - protein, 30 aa, synthetic construct
EVRLQQSGPDLIKPGASVKMSCKASGYTFT

SEQ ID NO: 7371 - protein, 32 aa, synthetic construct
QIQLQESGPGLVKPSETLSLTCTVSGFSINTG

SEQ ID NO: 7372 - protein, 32 aa, synthetic construct
QIQLQESGPGLVKPSQTLSLTCTVSGFSINTG

SEQ ID NO: 7373 - protein, 32 aa, synthetic construct
EIQLLESGGGLVQPGGSLRLSCAVSGFSINTG

SEQ ID NO: 7374 - protein, 32 aa, synthetic construct
QIQLVQSGAEVKKPGSSVKVSCKVSGFSINTG

SEQ ID NO: 7375 - protein, 32 aa, synthetic construct
EIQLVESGGGLVQPGGSLRLSCAVSGFSINTG

SEQ ID NO: 7376 - protein, 32 aa, synthetic construct
QIQLVQSGAEVKKPGASVKVSCKVSGFSINTG

SEQ ID NO: 7377 - protein, 32 aa, synthetic construct
QIQLVESGGGLVKPGGSLRLSCAVSGFSINTG

SEQ ID NO: 7378 - protein, 32 aa, synthetic construct
EIQLVQSGAEVKKPGATVKISCKVSGFSINTG

SEQ ID NO: 7379 - protein, 454 aa, synthetic construct
QVQLVQSGAEVKKPGSSVKVSCKASGYTFTGYVMHWVRQAPGQGLEWMGFINPYNDDIQSNERFRGRVTITSDKSTTTAYMELSSLRSEDTAVYYCARGAGYNFDGAYRFFDFWGQGTLVTVSSASTKGPSVFPLAPSSKSTSGGTAALGCLVKDYFPEPVTVSWNSGALTSGVHTFPAVLQSSGLYSLSSVVTVPSSSLGTQTYICNVNHKPSNTKVDKRVEPKSCDKTHTCPPCPAPELLGGPSVFLFPPKPKDTLMISRTPEVTCVVVDVSHEDPEVKFNWYVDGVEVHNAKTKPREEQYASTYRVVSVLTVLHQDWLNGKEYKCKVSNKALPAPIEKTISKAKGQPREPQVYTLPPCREEMTKNQVSLWCLVKGFYPSDIAVEWESNGQPENNYKTTPPVLDSDGSFFLYSKLTVDKSRWQQGNVFSCSVMHEALHNHYTQKSLSLSPGK

SEQ ID NO: 7380 - protein, 219 aa, synthetic construct
DVVMTQSPLSLPVTLGQPASISCRSSQRLVHSNGNTYLHWYQQRPGQSPRLLIYRVSNRFPGVPDRFSGSGSGTDFTLKISRVEAEDVGVYFCSQSTHVPYTFGGGTKVEIKRTVAAPSVFIFPPSDEQLKSGTASVVCLLNNFYPREAKVQWKVDNALQSGNSQESVTEQDSKDSTYSLSSTLTLSKADYEKHKVYACEVTHQGLSSPVTKSFNRGEC

SEQ ID NO: 7381 - protein, 472 aa, synthetic construct
QIQLQESGPGLVKPSQSLSLSCSVTGFSITTTGYHWNWIRQFPGKKLEWMGYIYSSGSTSYNPSLKSRFSITRDTSKNQFFLQLNSVTTEDTATYYCARGDWHYFDYWGPGTMVTVSSGGGGSGGGGSGGGGSGGGGSSFTLTQPPLVSVAVGQVATITCSGEKLSDKYVHWYQQKPGRAPVMVIYENDRRPSGIPDQFSGSNSGNIASLTISKAQAGDEADYFCQFWDSTNSAVFGGGTQLTVLDKTHTCPPCPAPELLGGPSVFLFPPKPKDTLMISRTPEVTCVVVDVSHEDPEVKFNWYVDGVEVHNAKTKPREEQYASTYRVVSVLTVLHQDWLNGKEYKCKVSNKALPAPIEKTISKAKGQPREPQVCTLPPSREEMTKNQVSLSCAVKGFYPSDIAVEWESNGQPENNYKTTPPVLDSDGSFFLVSKLTVDKSRWQQGNVFSCSVMHEALHNRFTQKSLSLSPGK

SEQ ID NO: 7382 - protein, 454 aa, synthetic construct
QVQLVQSGAEVKKPGSSVKVSCKASGYTFTGYVMHWVRQAPGQGLEWMGFIIPIFGTANYAQKFQGRVTITSDKSTTTAYMELSSLRSEDTAVYYCARGAGYNFDGAYRFFDFWGQGTLVTVSSASTKGPSVFPLAPSSKSTSGGTAALGCLVKDYFPEPVTVSWNSGALTSGVHTFPAVLQSSGLYSLSSVVTVPSSSLGTQTYICNVNHKPSNTKVDKRVEPKSCDKTHTCPPCPAPELLGGPSVFLFPPKPKDTLMISRTPEVTCVVVDVSHEDPEVKFNWYVDGVEVHNAKTKPREEQYASTYRVVSVLTVLHQDWLNGKEYKCKVSNKALPAPIEKTISKAKGQPREPQVYTLPPCREEMTKNQVSLWCLVKGFYPSDIAVEWESNGQPENNYKTTPPVLDSDGSFFLYSKLTVDKSRWQQGNVFSCSVMHEALHNHYTQKSLSLSPGK

SEQ ID NO: 7383 - protein, 473 aa, synthetic construct
EIQLLESGGGLVQPGGSLRLSCAVSGFSITTTGYHWNWVRQAPGKGLEWVGYIYSSGSTSYNPSLKSRFTISRDTSKNTFYLQMNSLRAEDTAVYYCARGDWHYFDYWGQGTMVTVSSGGGGSGGGGSGGGGSGGGGSDSVTTQSPLSLPVTLGQPASISCSGEKLSDKYVHWYQQRPGQSPRMLIYENDRRPSGVPDRFSGSNSGNDATLKISRVEAEDVGVYFCQFWDSTNSAVFGGGTKVEIKDKTHTCPPCPAPELLGGPSVFLFPPKPKDTLMISRTPEVTCVVVDVSHEDPEVKFNWYVDGVEVHNAKTKPREEQYASTYRVVSVLTVLHQDWLNGKEYKCKVSNKALPAPIEKTISKAKGQPREPQVCTLPPSREEMTKNQVSLSCAVKGFYPSDIAVEWESNGQPENNYKTTPPVLDSDGSFFLVSKLTVDKSRWQQGNVFSCSVMHEALHNHYTQKSLSLSPGK

SEQ ID NO: 7384 - protein, 472 aa, synthetic construct
EIQLLESGGGLVQPGGSLRLSCAVSGFSITTTGYHWNWVRQAPGKGLEWVGYIYSSGSTSYNPSLKSRFTISRDTSKNTFYLQMNSLRAEDTAVYYCARGDWHYFDYWGQGTMVTVSSGGGGSGGGGSGGGGSGGGGSSSETTQPPSVSVSPGQTASITCSGEKLSDKYVHWYQQKPGQSPVMVIYENDRRPSGIPERFSGSNSGNTATLTISGTQAMDEADYFCQFWDSTNSAVFGGGTQLTVLDKTHTCPPCPAPELLGGPSVFLFPPKPKDTLMISRTPEVTCVVVDVSHEDPEVKFNWYVDGVEVHNAKTKPREEQYASTYRVVSVLTVLHQDWLNGKEYKCKVSNKALPAPIEKTISKAKGQPREPQVCTLPPSREEMTKNQVSLSCAVKGFYPSDIAVEWESNGQPENNYKTTPPVLDSDGSFFLVSKLTVDKSRWQQGNVFSCSVMHEALHNHYTQKSLSLSPGK

SEQ ID NO: 7385 - protein, 16 aa, synthetic construct
YIYSSGTTKYNPSLKS

SEQ ID NO: 7386-7392 - skipped (7 entries)

SEQ ID NO: 7393 - protein, 30 aa, synthetic construct
QVQLVQSGAEVKKPGASVKVSCKASGYTFP

SEQ ID NO: 7394 - protein, 5 aa, synthetic construct
GFVMH

SEQ ID NO: 7395 - skipped

SEQ ID NO: 7396 - protein, 15 aa, synthetic construct
GNGMWFDGAYRFFDF

SEQ ID NO: 7397 - protein, 30 aa, synthetic construct
QVQLVQSGAEVKKPGASVKVSCKASGYPFH

SEQ ID NO: 7398 - protein, 15 aa, synthetic construct
GNGKNFDGAYRFFDF

SEQ ID NO: 7399 - protein, 30 aa, synthetic construct
QVQLVQSGAEVKKPGASVKVSCKASGYTYP

SEQ ID NO: 7400 - protein, 15 aa, synthetic construct
GNGKWFDGAYRFFDF

SEQ ID NO: 7401 - protein, 5 aa, synthetic construct
GYHMH

SEQ ID NO: 7402 - protein, 30 aa, synthetic construct
QVQLVQSGAEVKKPGASVKVSCKASNQNFH

SEQ ID NO: 7403 - protein, 15 aa, synthetic construct
GNGKWGDGAYRFFDF

SEQ ID NO: 7404 - protein, 30 aa, synthetic construct
QVQLVQSGAEVKKPGASVKVSCKASSQNFH

SEQ ID NO: 7405 - protein, 5 aa, synthetic construct
GFYMH

SEQ ID NO: 7406 - protein, 30 aa, synthetic construct
QVQLVQSGAEVKKPGASVKVSCKASYQDFH

SEQ ID NO: 7407 - protein, 5 aa, synthetic construct
GYKMH

SEQ ID NO: 7408 - protein, 30 aa, synthetic construct
QVQLVQSGAEVKKPGASVKVSCKASGYNFH

SEQ ID NO: 7409 - protein, 16 aa, synthetic construct
RSSQNLVHSNGRTYLH

SEQ ID NO: 7410 - protein, 16 aa, synthetic construct
RSSQNLVHSNGRTYLQ

SEQ ID NO: 7411 - protein, 124 aa, synthetic construct
QVQLVQSGAEVKKPGASVKVSCKASGYTFPGFVMHWVRQAPGQGLEWMGFINPYNDDIQSNERFRGRVTMTSDKSTTTAYMELSSLRSEDTAVYYCARGNGMWFDGAYRFFDFWGQGTLVTVSS

SEQ ID NO: 7412 - protein, 124 aa, synthetic construct
QVQLVQSGAEVKKPGASVKVSCKASGYPFHGYVMHWVRQAPGQGLEWMGFINPYNDDIQSNERFRGRVTMTSDKSTTTAYMELSSLRSEDTAVYYCARGNGKNFDGAYRFFDFWGQGTLVTVSS

SEQ ID NO: 7413 - protein, 124 aa, synthetic construct
QVQLVQSGAEVKKPGASVKVSCKASGYTYPGYVMHWVRQAPGQGLEWMGFINPYNDDIQSNERFRGRVTMTSDKSTTTAYMELSSLRSEDTAVYYCARGNGKWFDGAYRFFDFWGQGTLVTVSS

SEQ ID NO: 7414 - protein, 124 aa, synthetic construct
QVQLVQSGAEVKKPGASVKVSCKASNQNFHGYHMHWVRQAPGQGLEWMGFINPYNDDIQSNERFRGRVTMTSDKSTTTAYMELSSLRSEDTAVYYCARGNGKWGDGAYRFFDFWGQGTLVTVSS

SEQ ID NO: 7415 - protein, 124 aa, synthetic construct
QVQLVQSGAEVKKPGASVKVSCKASSQNFHGFYMHWVRQAPGQGLEWMGFINPYNDDIQSNERFRGRVTMTSDKSTTTAYMELSSLRSEDTAVYYCARGNGKWGDGAYRFFDFWGQGTLVTVSS

SEQ ID NO: 7416 - protein, 124 aa, synthetic construct
QVQLVQSGAEVKKPGASVKVSCKASYQDFHGYKMHWVRQAPGQGLEWMGFINPYNDDIQSNERFRGRVTMTSDKSTTTAYMELSSLRSEDTAVYYCARGNGKWGDGAYRFFDFWGQGTLVTVSS

SEQ ID NO: 7417 - protein, 124 aa, synthetic construct
QVQLVQSGAEVKKPGASVKVSCKASGYNFHGFYMHWVRQAPGQGLEWMGFINPYNDDIQSNERFRGRVTMTSDKSTTTAYMELSSLRSEDTAVYYCARGNGKWGDGAYRFFDFWGQGTLVTVSS

SEQ ID NO: 7418 - protein, 112 aa, synthetic construct
DVVMTQSPLSLPVTPGEPASISCRSSQNLVHSNGRTYLHWYLQKPGQSPQLLIYRVSNRFPGVPDRFSGSGSGTDFTLKISRVEAEDVGVYFCSQSTHVPYTFGGGTKVEIK

SEQ ID NO: 7419 - protein, 112 aa, synthetic construct
DVVMTQSPLSLPVTPGEPASISCRSSQNLVHSNGRTYLQWYLQKPGQSPQLLIYRVSNRFPGVPDRFSGSGSGTDFTLKISRVEAEDVGVYFCSQSTHVPYTFGGGTKVEIK

SEQ ID NO: 7420 - protein, 124 aa, synthetic construct
QVQLVQSGAEVKKPGASVKVSCKASTSGFHGYPMHWVRQAPGQGLEWMGFINPYNDDIQSNERFRGRVTMTSDKSTTTAYMELSSLRSEDTAVYYCARGNGKWGDGAYRFFDFWGQGTLVTVSS

SEQ ID NO: 7421 - protein, 30 aa, synthetic construct
QVQLVQSGAEVKKPGASVKVSCKASTSGFH

SEQ ID NO: 7422 - protein, 5 aa, synthetic construct
GYPMH

SEQ ID NO: 7423 - protein, 124 aa, synthetic construct
QVQLVQSGAEVKKPGASVKVSCKASPRGFHGYHMHWVRQAPGQGLEWMGFINPYNDDIQSNERFRGRVTMTSDKSTTTAYMELSSLRSEDTAVYYCARGNGKWGDGAYRFFDFWGQGTLVTVSS

SEQ ID NO: 7424 - protein, 30 aa, synthetic construct
QVQLVQSGAEVKKPGASVKVSCKASPRGFH

SEQ ID NO: 7425 - protein, 124 aa, synthetic construct
QVQLVQSGAEVKKPGASVKVSCKASFQDFHGYAMHWVRQAPGQGLEWMGFINPYNDDIQSNERFRGRVTMTSDKSTTTAYMELSSLRSEDTAVYYCARGNGKWGDGAYRFFDFWGQGTLVTVSS

SEQ ID NO: 7426 - protein, 30 aa, synthetic construct
QVQLVQSGAEVKKPGASVKVSCKASFQDFH

SEQ ID NO: 7427 - protein, 5 aa, synthetic construct
GYAMH

SEQ ID NO: 7428 - protein, 124 aa, synthetic construct
QVQLVQSGAEVKKPGASVKVSCKASSKDFHGFAMHWVRQAPGQGLEWMGFINPYNDDIQSNERFRGRVTMTSDKSTTTAYMELSSLRSEDTAVYYCARGNGKWGDGAYRFFDFWGQGTLVTVSS

SEQ ID NO: 7429 - protein, 30 aa, synthetic construct
QVQLVQSGAEVKKPGASVKVSCKASSKDFH

SEQ ID NO: 7430 - protein, 5 aa, synthetic construct
GFAMH

SEQ ID NO: 7431 - protein, 124 aa, synthetic construct
QVQLVQSGAEVKKPGASVKVSCKASPKGFHGYHMHWVRQAPGQGLEWMGFINPYNDDIQSNERFRGRVTMTSDKSTTTAYMELSSLRSEDTAVYYCARGNGKWGDGAYRFFDFWGQGTLVTVSS

SEQ ID NO: 7432 - protein, 30 aa, synthetic construct
QVQLVQSGAEVKKPGASVKVSCKASPKGFH

SEQ ID NO: 7433 - protein, 256 aa, synthetic construct
QVQLVQSGAEVKKPGASVKVSCKASTSGFHGYPMHWVRQAPGQGLEWMGFINPYNDDIQSNERFRGRVTMTSDKSTTTAYMELSSLRSEDTAVYYCARGNGKWGDGAYRFFDFWGQGTLVTVSSGGGGSGGGGSGGGGSGGGGSDVVMTQSPLSLPVTPGEPASISCRSSQNLVHSNGRTYLQWYLQKPGQSPQLLIYRVSNRFPGVPDRFSGSGSGTDFTLKISRVEAEDVGVYFCSQSTHVPYTFGGGTKVEIK

SEQ ID NO: 7434 - protein, 256 aa, synthetic construct
QVQLVQSGAEVKKPGASVKVSCKASPRGFHGYHMHWVRQAPGQGLEWMGFINPYNDDIQSNERFRGRVTMTSDKSTTTAYMELSSLRSEDTAVYYCARGNGKWGDGAYRFFDFWGQGTLVTVSSGGGGSGGGGSGGGGSGGGGSDVVMTQSPLSLPVTPGEPASISCRSSQNLVHSNGRTYLQWYLQKPGQSPQLLIYRVSNRFPGVPDRFSGSGSGTDFTLKISRVEAEDVGVYFCSQSTHVPYTFGGGTKVEIK

SEQ ID NO: 7435 - protein, 256 aa, synthetic construct
QVQLVQSGAEVKKPGASVKVSCKASFQDFHGYAMHWVRQAPGQGLEWMGFINPYNDDIQSNERFRGRVTMTSDKSTTTAYMELSSLRSEDTAVYYCARGNGKWGDGAYRFFDFWGQGTLVTVSSGGGGSGGGGSGGGGSGGGGSDVVMTQSPLSLPVTPGEPASISCRSSQNLVHSNGRTYLQWYLQKPGQSPQLLIYRVSNRFPGVPDRFSGSGSGTDFTLKISRVEAEDVGVYFCSQSTHVPYTFGGGTKVEIK

SEQ ID NO: 7436 - protein, 256 aa, synthetic construct
QVQLVQSGAEVKKPGASVKVSCKASSKDFHGFAMHWVRQAPGQGLEWMGFINPYNDDIQSNERFRGRVTMTSDKSTTTAYMELSSLRSEDTAVYYCARGNGKWGDGAYRFFDFWGQGTLVTVSSGGGGSGGGGSGGGGSGGGGSDVVMTQSPLSLPVTPGEPASISCRSSQNLVHSNGRTYLQWYLQKPGQSPQLLIYRVSNRFPGVPDRFSGSGSGTDFTLKISRVEAEDVGVYFCSQSTHVPYTFGGGTKVEIK

SEQ ID NO: 7437 - protein, 256 aa, synthetic construct
QVQLVQSGAEVKKPGASVKVSCKASPKGFHGYHMHWVRQAPGQGLEWMGFINPYNDDIQSNERFRGRVTMTSDKSTTTAYMELSSLRSEDTAVYYCARGNGKWGDGAYRFFDFWGQGTLVTVSSGGGGSGGGGSGGGGSGGGGSDVVMTQSPLSLPVTPGEPASISCRSSQNLVHSNGRTYLQWYLQKPGQSPQLLIYRVSNRFPGVPDRFSGSGSGTDFTLKISRVEAEDVGVYFCSQSTHVPYTFGGGTKVEIK

SEQ ID NO: 7438 - protein, 454 aa, synthetic construct
QVQLVQSGAEVKKPGASVKVSCKASTSGFHGYPMHWVRQAPGQGLEWMGFINPYNDDIQSNERFRGRVTMTSDKSTTTAYMELSSLRSEDTAVYYCARGNGKWGDGAYRFFDFWGQGTLVTVSSASTKGPSVFPLAPSSKSTSGGTAALGCLVKDYFPEPVTVSWNSGALTSGVHTFPAVLQSSGLYSLSSVVTVPSSSLGTQTYICNVNHKPSNTKVDKRVEPKSCDKTHTCPPCPAPELLGGPSVFLFPPKPKDTLMISRTPEVTCVVVDVSHEDPEVKFNWYVDGVEVHNAKTKPREEQYASTYRVVSVLTVLHQDWLNGKEYKCKVSNKALPAPIEKTISKAKGQPREPQVYTLPPCREEMTKNQVSLWCLVKGFYPSDIAVEWESNGQPENNYKTTPPVLDSDGSFFLYSKLTVDKSRWQQGNVFSCSVMHEALHNHYTQKSLSLSPGK

SEQ ID NO: 7439 - protein, 219 aa, synthetic construct
DVVMTQSPLSLPVTPGEPASISCRSSQNLVHSNGRTYLQWYLQKPGQSPQLLIYRVSNRFPGVPDRFSGSGSGTDFTLKISRVEAEDVGVYFCSQSTHVPYTFGGGTKVEIKRTVAAPSVFIFPPSDEQLKSGTASVVCLLNNFYPREAKVQWKVDNALQSGNSQESVTEQDSKDSTYSLSSTLTLSKADYEKHKVYACEVTHQGLSSPVTKSFNRGEC

SEQ ID NO: 7440 - protein, 454 aa, synthetic construct
QVQLVQSGAEVKKPGASVKVSCKASPRGFHGYHMHWVRQAPGQGLEWMGFINPYNDDIQSNERFRGRVTMTSDKSTTTAYMELSSLRSEDTAVYYCARGNGKWGDGAYRFFDFWGQGTLVTVSSASTKGPSVFPLAPSSKSTSGGTAALGCLVKDYFPEPVTVSWNSGALTSGVHTFPAVLQSSGLYSLSSVVTVPSSSLGTQTYICNVNHKPSNTKVDKRVEPKSCDKTHTCPPCPAPELLGGPSVFLFPPKPKDTLMISRTPEVTCVVVDVSHEDPEVKFNWYVDGVEVHNAKTKPREEQYASTYRVVSVLTVLHQDWLNGKEYKCKVSNKALPAPIEKTISKAKGQPREPQVYTLPPCREEMTKNQVSLWCLVKGFYPSDIAVEWESNGQPENNYKTTPPVLDSDGSFFLYSKLTVDKSRWQQGNVFSCSVMHEALHNHYTQKSLSLSPGK

SEQ ID NO: 7441 - skipped

SEQ ID NO: 7442 - protein, 15 aa, synthetic construct
  VARIANT 4: note = Lys or Met
  VARIANT 5: note = Trp or Asn
  VARIANT 6: note = Gly or Phe
GNGXXXDGAYRFFDF

SEQ ID NO: 7443 - protein, 16 aa, synthetic construct
  VARIANT 16: note = Gln or His
RSSQNLVHSNGRTYLX

SEQ ID NO: 7444 - protein, 20 aa, synthetic construct
METDTLLLWVLLLWVPGSTG

What is claimed is:

1. A method of identifying a subject in need of treatment for cancer using a composition comprising a polypeptide molecule comprising:
(i) a first antigen binding domain that binds to T cell receptor beta chain constant domain 1 (TRBC1) or T cell receptor beta chain constant domain 2 (TRBC2), and
(ii) a second antigen binding domain that binds to NKp30,
comprising determining whether a subject has cancer cells that express a T cell receptor comprising TRBC1 or TRBC2, wherein:
a determination that the subject has cancer cells that express a T cell receptor comprising TRBC2 identifies the subject as a candidate for treatment using a multifunctional molecule comprising an antigen binding domain that binds to TRBC2, or
a determination that the subject has cancer cells that express a T cell receptor comprising TRBC1 identifies the subject as a candidate for treatment using a multifunctional molecule comprising an antigen binding domain that binds to TRBC1.

2.-4. (canceled)

5. The method of claim 1, wherein the first antigen binding domain binds to T cell receptor beta chain constant domain 2 (TRBC2), and the first antigen binding domain comprises a VH comprising a heavy chain complementarity determining region 1 (VHCDR1), a VHCDR2, and a VHCDR3, and a VL comprising a light chain complementarity determining region 1 (VLCDR1), a VLCDR2, and a VLCDR3, wherein:
the VHCDR1, VHCDR2, and VHCDR3 comprise the amino acid sequences of GX1X2MH, wherein X1 is Y or F, and X2 is P, H, V, Y, K, or A (SEQ ID NO: 7441), FINPYNDDIQSNERFRG (SEQ ID NOs: 201), and GNGX1X2X3DGAYRFFDF, wherein X1 is K or M, X2 is W or N, and X3 is G or F (SEQ ID NO: 7442), respectively; or
the VLCDR1, VLCDR2, and VLCDR3 comprise the amino acid sequences of RSSQNLVHSNGRTYLX, wherein X is Q or H (SEQ ID NO: 7443), RVSNRFP (SEQ ID NO: 224), and SQSTHVPYT (SEQ ID NO: 225), respectively.

6. The method of claim 5,
wherein the VHCDR1, VHCDR2, and VHCDR3 comprise the amino acid sequences of:
SEQ ID NOs: 7422, 201, and 7403, respectively;
SEQ ID NOs: 7401, 201, and 7403, respectively;
SEQ ID NOs: 7394, 201, and 7396, respectively;
SEQ ID NOs: 7346, 201, and 7398, respectively;
SEQ ID NOs: 7346, 201, and 7400, respectively;
SEQ ID NOs: 7405, 201, and 7403, respectively;
SEQ ID NOs: 7407, 201, and 7403, respectively;
SEQ ID NOs: 7427, 201, and 7403, respectively; or
SEQ ID NOs: 7430, 201, and 7403, respectively,
or
wherein the VLCDR1, VLCDR2, and VLCDR3 comprise the amino acid sequences of:
SEQ ID NOs: 7410, 224, and 225, respectively; or
SEQ ID NOs: 7409, 224, and 225, respectively.

7. (canceled)

8. The method of claim 5, wherein the VHCDR1, VHCDR2, VHCDR3, VLCDR1, VLCDR2, and VLCDR3 comprise the amino acid sequences of:
SEQ ID NOs: 7422, 201, 7403, 7410, 224, and 225, respectively;
SEQ ID NOs: 7401, 201, 7403, 7410, 224, and 225, respectively;
SEQ ID NOs: 7394, 201, 7396, 7410, 224, and 225, respectively;
SEQ ID NOs: 7346, 201, 7398, 7410, 224, and 225, respectively;
SEQ ID NOs: 7346, 201, 7400, 7410, 224, and 225, respectively;
SEQ ID NOs: 7405, 201, 7403, 7410, 224, and 225, respectively;
SEQ ID NOs: 7407, 201, 7403, 7410, 224, and 225, respectively;
SEQ ID NOs: 7427, 201, 7403, 7410, 224, and 225, respectively;
SEQ ID NOs: 7430, 201, 7403, 7410, 224, and 225, respectively;
SEQ ID NOs: 7422, 201, 7403, 7409, 224, and 225, respectively;
SEQ ID NOs: 7401, 201, 7403, 7409, 224, and 225, respectively;
SEQ ID NOs: 7394, 201, 7396, 7409, 224, and 225, respectively;
SEQ ID NOs: 7346, 201, 7398, 7409, 224, and 225, respectively;
SEQ ID NOs: 7346, 201, 7400, 7409, 224, and 225, respectively;
SEQ ID NOs: 7405, 201, 7403, 7409, 224, and 225, respectively;
SEQ ID NOs: 7407, 201, 7403, 7409, 224, and 225, respectively;
SEQ ID NOs: 7427, 201, 7403, 7409, 224, and 225, respectively; or
SEQ ID NOs: 7430, 201, 7403, 7409, 224, and 225, respectively.

9. The method of claim 5, wherein the VH comprises an amino acid sequence that is at least 85% identical to any one of SEQ ID NOs: 7420, 7423, 7411, 7412, 7413, 7414, 7415, 7416, 7417, 7425, 7428, and 7431 or the VL comprises an amino acid sequence that is at least 85% identical to SEQ ID NO: 7419 or 7418.

10. The method of claim 5, wherein the VH and VL comprise amino acid sequences that are at least 85% identical to:
SEQ ID NOs: 7420 and 7419, respectively;
SEQ ID NOs: 7423 and 7419, respectively;
SEQ ID NOs: 7411 and 7419, respectively;
SEQ ID NOs: 7412 and 7419, respectively;
SEQ ID NOs: 7413 and 7419, respectively;
SEQ ID NOs: 7414 and 7419, respectively;
SEQ ID NOs: 7415 and 7419, respectively;
SEQ ID NOs: 7416 and 7419, respectively;
SEQ ID NOs: 7417 and 7419, respectively;
SEQ ID NOs: 7425 and 7419, respectively;
SEQ ID NOs: 7428 and 7419, respectively;
SEQ ID NOs: 7431 and 7419, respectively;
SEQ ID NOs: 7420 and 7418, respectively;
SEQ ID NOs: 7423 and 7418, respectively;
SEQ ID NOs: 7411 and 7418, respectively;
SEQ ID NOs: 7412 and 7418, respectively;
SEQ ID NOs: 7413 and 7418, respectively;
SEQ ID NOs: 7414 and 7418, respectively;
SEQ ID NOs: 7415 and 7418, respectively;
SEQ ID NOs: 7416 and 7418, respectively;
SEQ ID NOs: 7417 and 7418, respectively;
SEQ ID NOs: 7425 and 7418, respectively; or
SEQ ID NOs: 7428 and 7418, respectively;
SEQ ID NOs: 7431 and 7418, respectively.

11. The method of claim 1, wherein the first antigen binding domain binds to T cell receptor beta chain constant domain 2 (TRBC2), and wherein:
(i) the first antigen binding domain has a higher affinity for a T cell receptor comprising TRBC2 than for a T cell receptor not comprising TRBC2;
(ii) the first antigen binding domain has a higher affinity for a T cell receptor comprising TRBC2 than for a T cell receptor comprising TRBC1; or
(iii) binding of the first antigen binding domain to TRBC2 on a lymphoma cell or lymphocyte does not appreciably activate the lymphoma cell or lymphocyte expression of a T cell activation marker, or expression of a cytokine.

12. The method of claim 1, wherein the first antigen binding domain binds to T cell receptor beta chain constant domain 2 (TRBC2), and the polypeptide molecule binds to TRBC2 monovalently.

13. The method of claim 1, wherein:
(i) the polypeptide molecule comprises an anti-TRBC2 Fab and an anti-NKp30 scFv;
(ii) the polypeptide molecule comprises an anti-TRBC2 Fab and an anti-NKp30 Fab;
(iii) the polypeptide molecule comprises an anti-NKp30 Fab and an anti-TRBC2 scFv; or
(iv) the polypeptide molecule comprises an anti-TRBC2 scFv and an anti-NKp30 scFv.

14. The method of claim 1, wherein the polypeptide molecule further comprises a dimerization module comprising one or more immunoglobulin chain constant regions comprising one or more of: a paired cavity-protuberance (“knob-in-a hole”), an electrostatic interaction, or a strand-exchange.

15. (canceled)

16. The method of claim 1, wherein the polypeptide molecule comprises:
(i) an anti-TRBC2 VH that is at least 85% identical to SEQ ID NO: 7420, an anti-TRBC2 VL that is at least 85% identical to SEQ ID NO: 7419, an anti-NKp30 VH that is at least 85% identical to SEQ ID NO: 7302, and an anti-NKp30 VL that is at least 85% identical to SEQ ID NO: 7309;
(ii) an anti-TRBC2 VH that is at least 85% identical to SEQ ID NO: 7420, an anti-TRBC2 VL that is at least 85% identical to SEQ ID NO: 7419, and an anti-NKp30 scFv that is at least 85% identical to SEQ ID NO: 7311; or
(iii) amino acid sequences that are at least 85% identical to SEQ ID NOs: 7438, 7439, and 7383;
(iv) an anti-TRBC2 VH that is at least 85% identical to SEQ ID NO: 7423, an anti-TRBC2 VL that is at least 85% identical to SEQ ID NO: 7419, an anti-NKp30 VH that is at least 85% identical to SEQ ID NO: 7302, and an anti-NKp30 VL that is at least 85% identical to SEQ ID NO: 7309;
(v) an anti-TRBC2 VH that is at least 85% identical to SEQ ID NO: 7423, an anti-TRBC2 VL that is at least 85% identical to SEQ ID NO: 7419, and an anti-NKp30 scFv that is at least 85% identical to SEQ ID NO: 7311; or
(vi) amino acid sequences that are at least 85% identical to SEQ ID NOs: 440, 7 and 7383.

17.-20. (canceled)

21. The method of claim 1, wherein the second antigen binding domain comprises a VH comprising a heavy chain complementarity determining region 1 (VHCDR1), a VHCDR2, and a VHCDR3, and a VL comprising a light chain complementarity determining region 1 (VLCDR1), a VLCDR2, and a VLCDR3,
wherein the VHCDR1, VHCDR2, and VHCDR3 of the second antigen binding domain comprise the amino acid sequences of:
SEQ ID NOs: 7313, 6001, and 7315, respectively;
SEQ ID NOs: 7313, 6001, and 6002, respectively;
SEQ ID NOs: 7313, 6008, and 6009, respectively;
SEQ ID NOs: 7313, 7385, and 7315, respectively;
SEQ ID NOs: 7313, 7318, and 6009, respectively;
SEQ ID NOs: 375, 377, and 379, respectively;
SEQ ID NOs: 389, 391, and 393, respectively;
SEQ ID NOs: 403, 405, and 407, respectively;
SEQ ID NOs: 417, 419, and 421, respectively;
SEQ ID NOs: 431, 433, and 435, respectively;
SEQ ID NOs: 445, 447, and 449, respectively;
SEQ ID NOs: 459, 461, and 463, respectively; or
SEQ ID NOs: 472, 474, and 476, respectively,
or
wherein the VLCDR1, VLCDR2, and VLCDR3 of the second antigen binding domain comprise the amino acid sequences of:
SEQ ID NOs: 7326, 7327, and 7329, respectively;
SEQ ID NOs: 6063, 6064, and 7293, respectively;
SEQ ID NOs: 6070, 6071, and 6072, respectively;
SEQ ID NOs: 6070, 6064, and 7321, respectively;
SEQ ID NOs: 382, 384, and 386, respectively;
SEQ ID NOs: 396, 398, and 400, respectively;
SEQ ID NOs: 410, 412, and 414, respectively;
SEQ ID NOs: 424, 426, and 428, respectively;
SEQ ID NOs: 438, 440, and 442, respectively;
SEQ ID NOs: 452, 454, and 456, respectively;
SEQ ID NOs: 466, 468, and 469, respectively; or
SEQ ID NOs: 479, 481, and 483, respectively.

22. (canceled)

23. The method of claim 21, wherein the VHCDR1, VHCDR2, VHCDR3, VLCDR1, VLCDR2, and VLCDR3 of the second antigen binding domain comprise the amino acid sequences of:
SEQ ID NOs: 7313, 6001, 7315, 7326, 7327, and 7329, respectively;
SEQ ID NOs: 7313, 6001, 6002, 6063, 6064, and 7293, respectively;
SEQ ID NOs: 7313, 6008, 6009, 6070, 6071, and 6072, respectively;
SEQ ID NOs: 7313, 7385, 7315, 6070, 6064, and 7321, respectively;
SEQ ID NOs: 7313, 7318, 6009, 6070, 6064, and 7321, respectively;
SEQ ID NOs: 375, 377, 379, 382, 384, and 386, respectively;
SEQ ID NOs: 389, 391, 393, 396, 398, and 400, respectively;
SEQ ID NOs: 403, 405, 407, 410, 412, and 414, respectively;
SEQ ID NOs: 417, 419, 421, 424, 426, and 428, respectively;
SEQ ID NOs: 431, 433, 435, 438, 440, and 442, respectively;
SEQ ID NOs: 445, 447, 449, 452, 454, and 456, respectively;
SEQ ID NOs: 459, 461, 463, 466, 468, and 469, respectively; or
SEQ ID NOs: 472, 474, 476, 479, 481, and 483, respectively.

24. The method of claim 21, wherein:
(i) the VH of the second antigen binding domain comprises an amino acid sequence that is at least 85% identical to any one of SEQ ID NOs: 7302, 7298, 7300, 7301, 7303, and 7304 or the VL of the second antigen binding domain comprises an amino acid sequence that is at least 85% identical to any one of SEQ ID NOs: 7309, 7305, 7299, and 7306-7308;
(ii) the VH of the second antigen binding domain comprises an amino acid sequence that is at least 85% identical to any one of SEQ ID NOs: 6121 and 6123-6128 or the VL of the second antigen binding domain comprises an amino acid sequence that is at least 85% identical to any one of SEQ ID NOs: 7294 or 6137-6141; or
(iii) the VH of the second antigen binding domain comprises an amino acid sequence that is at least 85% identical to any one of SEQ ID NOs: 6122 and 6129-6134 or the VL of the second antigen binding domain comprises an amino acid sequence that is at least 85% identical to any one of SEQ ID NOs: 6136 or 6142-6147; or
(iv) the VH of the second antigen binding domain comprises an amino acid sequence that is at least 85% identical to any one of SEQ ID NOs: 357-364 or the VL of the second antigen binding domain comprises an amino acid sequence that is at least 85% identical to any one of SEQ ID NOs: 365-372.

25. The method of claim 21,
wherein the VH and VL of the second antigen binding domain comprise amino acid sequences that are at least 85% identical to:
SEQ ID NOs: 7302 and 7309, respectively; or
SEQ ID NOs: 7302 and 7305, respectively,
or
wherein the second antigen binding domain comprise the amino acid sequence that is at least 85% identical to any one of SEQ ID NOs: 7311, 7310, 6187-6190, 373, and 485-491.

26. (canceled)

27. The method of claim 1, further comprising:
responsive to identifying the subject as a candidate for treatment using a multifunctional molecule comprising an antigen binding domain that binds to TRBC2, treating the subject with the multifunctional molecule.

28. The method of claim 1,
wherein the cancer is leukemia or lymphoma.

29. The method of claim 1, wherein the cancer is selected from Acquired immune deficiency syndrome (AIDS)-associated lymphoma, Angioimmunoblastic T-cell lymphoma, Adult T-cell leukemia/lymphoma, Burkitt lymphoma, Central nervous system (CNS) lymphoma, Diffuse large B-cell lymphoma (DLBCL), Lymphoblastic lymphoma, Mantle cell lymphoma (MCL), Peripheral T-cell lymphoma (PTCL), Transformed follicular and transformed mucosa-associated lymphoid tissue (MALT) lymphomas, Cutaneous T-cell lymphoma (mycosis fungoides and Sézary syndrome), Follicular lymphoma, Lymphoplasmacytic lymphoma/Waldenström macroglobulinemia, Marginal zone B-cell lymphoma, Gastric mucosa-associated lymphoid tissue (MALT) lymphoma, Chronic lymphocytic leukemia/small-cell lymphocytic lymphoma (CLL/SLL), Extranodal T-/NK-cell lymphoma (nasal type), and Anaplastic large-cell lymphoma.

30.-51. (canceled)

52. The method of claim 1, wherein a determination that the subject has cancer cells that express a T cell receptor comprising TRBC2 identifies the subject as not being as a candidate for treatment using a multifunctional molecule comprising an antigen binding domain that binds to TRBC1.

53. The method of claim 1, wherein a determination that the subject has cancer cells that express a T cell receptor comprising TRBC1 identifies the subject as not being as a candidate for treatment using a multifunctional molecule comprising an antigen binding domain that binds to TRBC2.
